(19) United States
(12) Patent Application Publication
(10) Pub. No.: US 2025/0340658 A1
(43) Pub. Date: Nov. 6, 2025

(54) Methods and Compositions Relating to GLP1R Variants

(71) Applicant: Twist Bioscience Corporation, South San Francisco, CA (US)

(72) Inventors: Aaron Sato, Burlingame, CA (US); Pankaj Garg, Burlingame, CA (US); Qiang Liu, Palo Alto, CA (US); Fumiko Axelrod, Palo Alto, CA (US)

(73) Assignee: Twist Bioscience Corporation, South San Francisco, CA (US)

(21) Appl. No.: 19/276,502

(22) Filed: Jul. 22, 2025

Related U.S. Application Data
(62) Division of application No. 17/412,139, filed on Aug. 25, 2021, now Pat. No. 12,391,762.
(60) Provisional application No. 63/070,734, filed on Aug. 26, 2020.
(60) Provisional application No. 63/081,801, filed on Sep. 22, 2020.

(51) Int. Cl. C07K 16/28

(52) U.S. Cl. CPC C07K 16/2869; C07K 2317/24; C07K 2317/565; C07K 2317/75; C07K 2317/76; C07K 2317/92

(57) ABSTRACT

Provided herein are methods and compositions relating to glucagon-like peptide-1 receptor (GLP1R) libraries having nucleic acids encoding for immunoglobulins that bind to GLP1R. Libraries described herein include variegated libraries comprising nucleic acids each encoding for a predetermined variant of at least one predetermined reference nucleic acid sequence. Further described herein are protein libraries generated when the nucleic acid libraries are translated. Further described herein are cell libraries expressing variegated nucleic acid libraries described herein.

### CROSS-REFERENCE TO RELATED APPLICATIONS

[0001] This application is a Divisional application of U.S. patent application Ser. No. 17/412,139 filed on Aug. 25, 2021, which claims the benefit of U.S. Provisional Patent Application No. 63/070,734 filed on Aug. 26, 2020, and U.S. Provisional Patent Application No. 63/081,801 filed on Sep. 22, 2020, each of which is incorporated by reference in its entirety.

### REFERENCE TO ELECTRONIC SEQUENCE LISTING

[0002] The application contains a Sequence Listing which has been submitted electronically in .XML format and is hereby incorporated by reference in its entirety. Said .XML copy, created on Jun. 3, 2025, is named “01356-0008-01US.xml” and is 1,831,045 bytes in size. The sequence listing contained in this .XML file is part of the specification and is hereby incorporated by reference herein in its entirety.

### BACKGROUND

[0003] G protein-coupled receptors (GPCRs) are implicated in a wide variety of diseases. Raising antibodies to GPCRs has been difficult due to problems in obtaining suitable antigens because GPCRs are often expressed at low levels in cells and are very unstable when purified. Thus, there is a need for improved agents for therapeutic intervention which target GPCRs.

### INCORPORATION BY REFERENCE

[0004] All publications, patents, and patent applications mentioned in this specification are herein incorporated by reference to the same extent as if each individual publication, patent, or patent application was specifically and individually indicated to be incorporated by reference.

### BRIEF SUMMARY

[0005] Provided herein are antibodies or antibody fragments that binds GLP1R, comprising an immunoglobulin heavy chain and an immunoglobulin light chain: (a) wherein the immunoglobulin heavy chain comprises an amino acid sequence at least about 90% identical to that set forth in Table 9; and (b) wherein the immunoglobulin light chain comprises an amino acid sequence at least about 90% identical to that set forth in Table 10. Further provided herein are antibodies or antibody fragments, wherein the antibody is a monoclonal antibody, a polyclonal antibody, a bi-specific antibody, a multispecific antibody, a grafted antibody, a human antibody, a humanized antibody, a synthetic antibody, a chimeric antibody, a camelized antibody, a single-chain Fvs (scFv), a single chain antibody, a Fab fragment, a F(ab′)2 fragment, a Fd fragment, a Fv fragment, a single-domain antibody, an isolated complementarity determining region (CDR), a diabody, a fragment comprised of only a single monomeric variable domain, disulfide-linked Fvs (sdFv), an intrabody, an anti-idiotypic (anti-Id) antibody, or ab antigen-binding fragments thereof. Further provided herein are antibodies or antibody fragments, wherein the antibody or antibody fragment thereof is chimeric or humanized. Further provided herein are antibodies or antibody fragments, wherein the antibody or antibody fragment has an EC50 less than about 25 nanomolar in a cAMP assay. Further provided herein are antibodies or antibody fragments, wherein the antibody or antibody fragment has an EC50 less than about 20 nanomolar in a cAMP assay. Further provided herein are antibodies or antibody fragments, wherein the antibody or antibody fragment has an EC50 less than about 10 nanomolar in a cAMP assay. Further provided herein are antibodies or antibody fragments, wherein the antibody or antibody fragment is an agonist of GLP1R. Further provided herein are antibodies or antibody fragments, wherein the antibody or antibody fragment is an antagonist of GLP1R. Further provided herein are antibodies or antibody fragments, wherein the antibody or antibody fragment is an allosteric modulator of GLP1R. Further provided herein are antibodies or antibody fragments, wherein the allosteric modulator of GLP1R is a negative allosteric modulator.

[0006] Provided herein are methods of treating a metabolic disease or disorder comprising administering an antibody or antibody fragment that binds GLP1R, wherein the antibody or antibody fragment comprises a sequence set forth in Tables 7-13. Further provided herein are methods, wherein the antibody is a monoclonal antibody, a polyclonal antibody, a bi-specific antibody, a multispecific antibody, a grafted antibody, a human antibody, a humanized antibody, a synthetic antibody, a chimeric antibody, a camelized antibody, a single-chain Fvs (scFv), a single chain antibody, a Fab fragment, a F(ab′)2 fragment, a Fd fragment, a Fv fragment, a single-domain antibody, an isolated complementarity determining region (CDR), a diabody, a fragment comprised of only a single monomeric variable domain, disulfide-linked Fvs (sdFv), an intrabody, an anti-idiotypic (anti-Id) antibody, or ab antigen-binding fragments thereof. Further provided herein are methods, wherein the antibody or antibody fragment thereof is chimeric or humanized. Further provided herein are methods, wherein the antibody or antibody fragment has an EC50 less than about 25 nanomolar in a cAMP assay. Further provided herein are methods, wherein the antibody or antibody fragment has an EC50 less than about 20 nanomolar in a cAMP assay. Further provided herein are methods, wherein the antibody or antibody fragment has an EC50 less than about 10 nanomolar in a cAMP assay. Further provided herein are methods, wherein the antibody or antibody fragment is an agonist of GLP1R. Further provided herein are methods, wherein the antibody or antibody fragment is an antagonist of GLP1R. Further provided herein are methods, wherein the antibody or antibody fragment is an allosteric modulator of GLP1R. Further provided herein are methods, wherein the allosteric modulator of GLP1R is a negative allosteric modulator. Further provided herein are methods, wherein the antibody or antibody fragment is an allosteric modulator. Further provided herein are methods, wherein the antibody or antibody fragment is a negative allosteric modulator. Further provided herein are methods, wherein the metabolic disease or disorder is Type II diabetes or obesity.

[0007] Provided herein are antibodies or antibody fragments comprising a variable domain, heavy chain region (VH) and a variable domain, light chain region (VL), wherein VH comprises complementarity determining regions CDRH1, CDRH2, and CDRH3, wherein VL comprises complementarity determining regions CDRL1, CDRL2, and CDRL3, and wherein (a) an amino acid sequence of CDRH1 is as set forth in any one of SEQ ID NOs: 441-619; (b) an amino acid sequence of CDRH2 is as set forth in any one of SEQ ID NOs: 620-798; (c) an amino acid sequence of CDRH3 is as set forth in any one of SEQ ID NOs: 799-977; (d) an amino acid sequence of CDRL1 is as set forth in any one of SEQ ID NOs: 978-1156; (e) an amino acid sequence of CDRL2 is as set forth in any one of SEQ ID NOs: 1157-1335; and (f) an amino acid sequence of CDRL3 is as set forth in any one of SEQ ID NOs: 1336-1347 and 1353-1519. Further provided herein are antibodies or antibody fragments, wherein the antibody is a monoclonal antibody, a polyclonal antibody, a bi-specific antibody, a multispecific antibody, a grafted antibody, a human antibody, a humanized antibody, a synthetic antibody, a chimeric antibody, a camelized antibody, a single-chain Fvs (scFv), a single chain antibody, a Fab fragment, a F(ab′)2 fragment, a Fd fragment, a Fv fragment, a single-domain antibody, an isolated complementarity determining region (CDR), a diabody, a fragment comprised of only a single monomeric variable domain, disulfide-linked Fvs (sdFv), an intrabody, an anti-idiotypic (anti-Id) antibody, or ab antigen-binding fragments thereof. Further provided herein are antibodies or antibody fragments, wherein the antibody or antibody fragment thereof is chimeric or humanized. Further provided herein are antibodies or antibody fragments, wherein the antibody or antibody fragment has an EC50 less than about 25 nanomolar in a cAMP assay. Further provided herein are antibodies or antibody fragments, wherein the antibody or antibody fragment has an EC50 less than about 20 nanomolar in a cAMP assay. Further provided herein are antibodies or antibody fragments, wherein the antibody or antibody fragment has an EC50 less than about 10 nanomolar in a cAMP assay. Further provided herein are antibodies or antibody fragments, wherein the antibody or antibody fragment is an agonist of GLP1R. Further provided herein are antibodies or antibody fragments, wherein the antibody or antibody fragment is an antagonist of GLP1R. Further provided herein are antibodies or antibody fragments, wherein the antibody or antibody fragment is an allosteric modulator of GLP1R. Further provided herein are antibodies or antibody fragments, wherein the allosteric modulator of GLP1R is a negative allosteric modulator. Further provided herein are antibodies or antibody fragments, wherein the VH comprises a sequence at least about 90% identical to any one of SEQ ID NOs: 58-77. Further provided herein are antibodies or antibody fragments, wherein the VH comprises a sequence of any one of SEQ ID NOs: 58-77. Further provided herein are antibodies or antibody fragments, wherein the VL comprises a sequence at least about 90% identical to any one of SEQ ID NOs: 92-111. Further provided herein are antibodies or antibody fragments, wherein the VL comprises a sequence of any one of SEQ ID NOs: 92-111.

[0008] Provided herein are methods of treating a metabolic disease or disorder comprising administering an antibody or antibody fragment that binds GLP1R comprising a variable domain, heavy chain region (VH) and a variable domain, light chain region (VL), wherein VH comprises complementarity determining regions CDRH1, CDRH2, and CDRH3, wherein VL comprises complementarity determining regions CDRL1, CDRL2, and CDRL3, and wherein (a) an amino acid sequence of CDRH1 is as set forth in any one of SEQ ID NOs: 441-619; (b) an amino acid sequence of CDRH2 is as set forth in any one of SEQ ID NOs: 620-798; (c) an amino acid sequence of CDRH3 is as set forth in any one of SEQ ID NOs: 799-977; (d) an amino acid sequence of CDRL1 is as set forth in any one of SEQ ID NOs: 978-1156; (e) an amino acid sequence of CDRL2 is as set forth in any one of SEQ ID NOs: 1157-1335; and (f) an amino acid sequence of CDRL3 is as set forth in any one of SEQ ID NOs: 1336-1347 and 1353-1519. Further provided herein are methods, wherein the antibody is a monoclonal antibody, a polyclonal antibody, a bi-specific antibody, a multispecific antibody, a grafted antibody, a human antibody, a humanized antibody, a synthetic antibody, a chimeric antibody, a camelized antibody, a single-chain Fvs (scFv), a single chain antibody, a Fab fragment, a F(ab′)2 fragment, a Fd fragment, a Fv fragment, a single-domain antibody, an isolated complementarity determining region (CDR), a diabody, a fragment comprised of only a single monomeric variable domain, disulfide-linked Fvs (sdFv), an intrabody, an anti-idiotypic (anti-Id) antibody, or ab antigen-binding fragments thereof. Further provided herein are methods, wherein the antibody or antibody fragment thereof is chimeric or humanized. Further provided herein are methods, wherein the antibody or antibody fragment has an EC50 less than about 25 nanomolar in a cAMP assay. Further provided herein are methods, wherein the antibody or antibody fragment has an EC50 less than about 20 nanomolar in a cAMP assay. Further provided herein are methods, wherein the antibody or antibody fragment has an EC50 less than about 10 nanomolar in a cAMP assay. Further provided herein are methods, wherein the antibody or antibody fragment is an agonist of GLP1R. Further provided herein are methods, wherein the antibody or antibody fragment is an antagonist of GLP1R. Further provided herein are methods, wherein the antibody or antibody fragment is an allosteric modulator of GLP1R. Further provided herein are methods, wherein the allosteric modulator of GLP1R is a negative allosteric modulator. Further provided herein are methods, wherein the antibody or antibody fragment is an allosteric modulator. Further provided herein are methods, wherein the antibody or antibody fragment is a negative allosteric modulator. Further provided herein are methods, wherein the VH comprises a sequence at least about 90% identical to any one of SEQ ID NOs: 58-77. Further provided herein are methods, wherein the VH comprises a sequence of any one of SEQ ID NOs: 58-77. Further provided herein are methods, wherein the VL comprises a sequence at least about 90% identical to any one of SEQ ID NOs: 92-111. Further provided herein are methods, wherein the VL comprises a sequence of any one of SEQ ID NOs: 92-111. Further provided herein are methods, wherein the metabolic disease or disorder is Type II diabetes or obesity.

[0009] Provided herein are nucleic acid compositions comprising: a) a first nucleic acid encoding a variable domain, heavy chain region (VH) comprising complementarity determining regions CDRH1, CDRH2, and CDRH3, and wherein (i) an amino acid sequence of CDRH1 is as set forth in any one of SEQ ID NOs: 441-619; (ii) an amino acid sequence of CDRH2 is as set forth in any one of SEQ ID NOs: 620-798; (iii) an amino acid sequence of CDRH3 is as set forth in any one of SEQ ID NOs: 799-977; b) a second nucleic acid encoding a variable domain, light chain region (VL) comprising complementarity determining regions CDRL1, CDRL2, and CDRL3, and wherein (i) an amino acid sequence of CDRL1 is as set forth in any one of SEQ ID NOs: 978-1156; (ii) an amino acid sequence of CDRL2 is as set forth in any one of SEQ ID NOs: 1157-1335; and (iii) an amino acid sequence of CDRL3 is as set forth in any one of SEQ ID NOs: 1336-1347 and 1353-1519.

[0010] Provided herein are nucleic acid compositions comprising: a) a first nucleic acid encoding a variable domain, heavy chain region (VH) comprising an amino acid sequence at least about 90% identical to a sequence as set forth in any one of SEQ ID NOs: 58-77; b) a second nucleic acid encoding a variable domain, light chain region (VL) comprising at least about 90% identical to a sequence as set forth in any one of SEQ ID NOs: 92-111; and an excipient. Further provided herein are nucleic acid compositions, wherein the VH comprises an amino acid sequence as set forth in any one of SEQ ID NOs: 58-77. Further provided herein are nucleic acid compositions, wherein the VL comprises an amino acid sequence as set forth in any one of SEQ ID NOs: 92-111. Further provided herein are nucleic acid compositions, wherein the VH comprises an amino acid sequence as set forth in any one of SEQ ID NOs: 58-77, and wherein the VL comprises an amino acid sequence as set forth in any one of SEQ ID NOs: 92-111.

### BRIEF DESCRIPTION OF THE DRAWINGS

[0011] FIG. 1A depicts a first schematic of an immunoglobulin.

[0012] FIG. 1B depicts a second schematic of an immunoglobulin.

[0013] FIG. 2 depicts a schematic of a motif for placement in an immunoglobulin.

[0014] FIG. 3 presents a diagram of steps demonstrating an exemplary process workflow for gene synthesis as disclosed herein.

[0015] FIG. 4 illustrates an example of a computer system.

[0016] FIG. 5 is a block diagram illustrating an architecture of a computer system.

[0017] FIG. 6 is a diagram demonstrating a network configured to incorporate a plurality of computer systems, a plurality of cell phones and personal data assistants, and Network Attached Storage (NAS).

[0018] FIG. 7 is a block diagram of a multiprocessor computer system using a shared virtual address memory space.

[0019] FIG. 8A depicts a schematic of an immunoglobulin comprising a VH domain attached to a VL domain using a linker.

[0020] FIG. 8B depicts a schematic of a full-domain architecture of an immunoglobulin comprising a VH domain attached to a VL domain using a linker, a leader sequence, and pIII sequence.

[0021] FIG. 8C depicts a schematic of four framework elements (FW1, FW2, FW3, FW4) and the variable 3 CDR (L1, L2, L3) elements for a VL or VH domain.

[0022] FIG. 9A depicts a structure of Glucagon-like peptide 1 (GLP-1) in complex with GLP-1 receptor (GLP-1R), PDB entry 5VAI.

[0023] FIG. 9B depicts a crystal structure of CXCR4 chemokine receptor in complex with a cyclic peptide antagonist CVX15, PDB entry 3OR0.

[0024] FIG. 9C depicts a crystal structure of human smoothened receptor with the transmembrane domain and extracellular domain (ECD), PDB entry 5L7D. The ECD contacts the TMD through extracellular loop 3 (ECL3).

[0025] FIG. 9D depicts a structure of GLP-1R in complex with a Fab, PDB entry 6LN2.

[0026] FIG. 9E depicts a crystal structure of CXCR4 in complex with a viral chemokine antagonist Viral macrophage inflammatory protein 2 (vMIP-II), PDB entry 4RWS.

[0027] FIG. 10 depicts a schema of the GPCR focused library design. Two germline heavy chain VH1-69 and VH3-30; 4 germline light chain IGKV1-39 and IGKV3-15, and IGLV1-51 and IGLV2-14.

[0028] FIG. 11 depicts a graph of HCDR3 length distribution in the GPCR-focused library compared to the HCDR3 length distribution in B-cell populations from three healthy adult donors. In total, 2,444,718 unique VH sequences from the GPCR library and 2,481,511 unique VH sequences from human B-cell repertoire were analyzed to generate the length distribution plot.

[0029] FIG. 12A depicts the design of the over-expressing GLP-1R CHO cells for the phage antibody library selection. GLP-1R expression was confirmed by the gating of double detection of GFP green fluorescence and the surface expression of Flag tag on the cell surface.

[0030] FIG. 12B depicts a cell-based panning process.

[0031] FIG. 13 depicts a graph of percent unique HCDR3 in the output pools of the five GLP-1R panning rounds.

[0032] FIG. 14 depicts a graph of binding plots of the 13 unique GLP-1R Hits, compared to the parental CHO cell binding.

[0033] FIG. 15 depicts HCDR3 loop sequences of the 13 unique GLP1R binders. Six of the clones have a GLP-1 motif, four of the clones have a GLP-2 motif, and three clones do not have a GLP-1 or GLP-2 motif. For the clones that have the GLP-1 or GLP-2 motif (bolded), residues that are similar to the GLP-1 sequence or the GLP-2 sequence are bolded and the residues that are different are left unbolded. Functional antagonists in the cAMP assay are enclosed by a box. FIG. 15 discloses SEQ ID NOS 1528, 1-2, 27, 12, 3, 32, 1529, 23, 25, 30, 1530, 19, 22 and 24, respectively, in order of appearance.

[0034] FIG. 16A depicts a graph of orthosteric inhibition of GLP1R-3 binding in the absence and presence of GLP-1 (7-36).

[0035] FIG. 16B depicts a graph of effects of GLP1R-3 on GLP-1 activation in the cAMP assay.

[0036] FIG. 16C depicts a graph of effects of GLP1R-3 on GLP-1 induced β-arrestin recruitment.

[0037] FIG. 17 depicts a design of GLP1R-59-2. The GLP1 (7-36) peptide (SEQ ID NO:1528) was linked to the N-terminal of light chain of the functionally inactive GLP-1R binding antibody GLP1R-2.

[0038] FIG. 18A depicts a graph of GLP1R-59-2 binding specifically to the GLP-1R with an EC50 of 15.5 nM.

[0039] FIG. 18B depicts a graph of GLP1R-59-2 in the cAMP assay with a similar EC50 as the GLP-1 7-36 peptide.

[0040] FIG. 18C depicts a graph of GLP1R-59-2 on inducing the β-arrestin recruitment in GLP-1R expression cells.

[0041] FIGS. 19A-19B depict in vivo pharmacokinetic (PK) and pharmacodynamic (PD) effects of GLP1R-3 and GLP1R-59-2. Based on the beta phase calculation, GLP1R-3 has a 1-week half-life in rat (FIG. 19A). GLP1R-59-2 has a 2-day half-life in rat (FIG. 19B).

[0042] FIG. 20A depicts a graph of GLP1R-59-2 on glucose after glucose challenge.

[0043] FIG. 20B depicts a graph of Area Under the Curve (AUC) in a glucose tolerance test (GTT).

[0044] FIG. 21A depicts a graph of GLP1R-3 and GLP-1 peptide Exendin 9-39 treatment, 19+2 hour dosing regimen

[0045] FIG. 21B depicts a graph of Area Under the Curve (AUC) in an insulin tolerance test (ITT).

[0046] FIG. 22A depicts a graph of GLP1R-3 treatment, single 6 hour dosing regimen after insulin challenge, as compared to GLP-1 peptide Exendin 9-39 (1.0 or 0.23 mg/kg dose) or control.

[0047] FIG. 22B depicts a graph of Area Under the Curve (AUC) of GLP1R-3 (20 mg/kg) treatment at 6 hours in an ITT.

[0048] FIG. 23A depicts a graph of GLP1R-3 treatment, single 6 hour dosing regimen after insulin challenge, as compared to GLP1R-226-1, GLP1R-226-2, or control.

[0049] FIG. 23B depicts a graph Area Under the Curve (AUC) of GLP1R-3 treatment, single 6 hour dosing regimen after insulin challenge, as compared to GLP1R-226-1, GLP1R-226-2, or control.

[0050] FIGS. 24A-24B are schemas of panning strategy for GLP1R-221 and GLP1R-222 variants.

[0051] FIGS. 25A-25B are graphs of competition data for GLP1R-221 and GLP1R-222 variants.

[0052] FIG. 26 is a graph of GLP1R-221 and GLP1R-222 variants in a cAMP assay.

### DETAILED DESCRIPTION

[0053] The present disclosure employs, unless otherwise indicated, conventional molecular biology techniques, which are within the skill of the art. Unless defined otherwise, all technical and scientific terms used herein have the same meaning as is commonly understood by one of ordinary skill in the art.

### Definitions

[0054] Throughout this disclosure, various embodiments are presented in a range format. It should be understood that the description in range format is merely for convenience and brevity and should not be construed as an inflexible limitation on the scope of any embodiments. Accordingly, the description of a range should be considered to have specifically disclosed all the possible subranges as well as individual numerical values within that range to the tenth of the unit of the lower limit unless the context clearly dictates otherwise. For example, description of a range such as from 1 to 6 should be considered to have specifically disclosed subranges such as from 1 to 3, from 1 to 4, from 1 to 5, from 2 to 4, from 2 to 6, from 3 to 6 etc., as well as individual values within that range, for example, 1.1, 2, 2.3, 5, and 5.9. This applies regardless of the breadth of the range. The upper and lower limits of these intervening ranges may independently be included in the smaller ranges, and are also encompassed within the disclosure, subject to any specifically excluded limit in the stated range. Where the stated range includes one or both of the limits, ranges excluding either or both of those included limits are also included in the disclosure, unless the context clearly dictates otherwise.

[0055] The terminology used herein is for the purpose of describing particular embodiments only and is not intended to be limiting of any embodiment. As used herein, the singular forms “a,” “an” and “the” are intended to include the plural forms as well, unless the context clearly indicates otherwise. It will be further understood that the terms “comprises” and/or “comprising,” when used in this specification, specify the presence of stated features, integers, steps, operations, elements, components, and/or groups, but do not preclude the presence or addition of one or more other features, integers, steps, operations, elements, components, and/or groups thereof. As used herein, the term “and/or” includes any and all combinations of one or more of the associated listed items.

[0056] Unless specifically stated or obvious from context, as used herein, the term “about” in reference to a number or range of numbers is understood to mean the stated number and numbers +/−10% thereof, or 10% below the lower listed limit and 10% above the higher listed limit for the values listed for a range.

[0057] Unless specifically stated, as used herein, the term “nucleic acid” encompasses double- or triple-stranded nucleic acids, as well as single-stranded molecules. In double- or triple-stranded nucleic acids, the nucleic acid strands need not be coextensive (i.e., a double-stranded nucleic acid need not be double-stranded along the entire length of both strands). Nucleic acid sequences, when provided, are listed in the 5′ to 3′ direction, unless stated otherwise. Methods described herein provide for the generation of isolated nucleic acids. Methods described herein additionally provide for the generation of isolated and purified nucleic acids. A “nucleic acid” as referred to herein can comprise at least 5, 10, 20, 30, 40, 50, 60, 70, 80, 90, 100, 125, 150, 175, 200, 225, 250, 275, 300, 325, 350, 375, 400, 425, 450, 475, 500, 600, 700, 800, 900, 1000, 1100, 1200, 1300, 1400, 1500, 1600, 1700, 1800, 1900, 2000, or more bases in length. Moreover, provided herein are methods for the synthesis of any number of polypeptide-segments encoding nucleotide sequences, including sequences encoding non-ribosomal peptides (NRPs), sequences encoding non-ribosomal peptide-synthetase (NRPS) modules and synthetic variants, polypeptide segments of other modular proteins, such as antibodies, polypeptide segments from other protein families, including non-coding DNA or RNA, such as regulatory sequences e.g. promoters, transcription factors, enhancers, siRNA, shRNA, RNAi, miRNA, small nucleolar RNA derived from microRNA, or any functional or structural DNA or RNA unit of interest. The following are non-limiting examples of polynucleotides: coding or non-coding regions of a gene or gene fragment, intergenic DNA, loci (locus) defined from linkage analysis, exons, introns, messenger RNA (mRNA), transfer RNA, ribosomal RNA, short interfering RNA (siRNA), short-hairpin RNA (shRNA), micro-RNA (miRNA), small nucleolar RNA, ribozymes, complementary DNA (cDNA), which is a DNA representation of mRNA, usually obtained by reverse transcription of messenger RNA (mRNA) or by amplification; DNA molecules produced synthetically or by amplification, genomic DNA, recombinant polynucleotides, branched polynucleotides, plasmids, vectors, isolated DNA of any sequence, isolated RNA of any sequence, nucleic acid probes, and primers. cDNA encoding for a gene or gene fragment referred herein may comprise at least one region encoding for exon sequences without an intervening intron sequence in the genomic equivalent sequence.

### GPCR Libraries for GLP1 Receptor

[0058] Provided herein are methods and compositions relating to G protein-coupled receptor (GPCR) binding libraries for glucagon-like peptide-1 receptor (GLP1R) comprising nucleic acids encoding for an immunoglobulin comprising a GPCR binding domain. Immunoglobulins as described herein can stably support a GPCR binding domain. The GPCR binding domain may be designed based on surface interactions of a GLP1R ligand and GLP1R. Libraries as described herein may be further variegated to provide for variant libraries comprising nucleic acids each encoding for a predetermined variant of at least one predetermined reference nucleic acid sequence. Further described herein are protein libraries that may be generated when the nucleic acid libraries are translated. In some instances, nucleic acid libraries as described herein are transferred into cells to generate a cell library. Also provided herein are downstream applications for the libraries synthesized using methods described herein. Downstream applications include identification of variant nucleic acids or protein sequences with enhanced biologically relevant functions, e.g., improved stability, affinity, binding, functional activity, and for the treatment or prevention of a disease state associated with GPCR signaling.

[0059] Provided herein are libraries comprising nucleic acids encoding for an immunoglobulin. In some instances, the immunoglobulin is an antibody. As used herein, the term antibody will be understood to include proteins having the characteristic two-armed, Y-shape of a typical antibody molecule as well as one or more fragments of an antibody that retain the ability to specifically bind to an antigen. Exemplary antibodies include, but are not limited to, a monoclonal antibody, a polyclonal antibody, a bi-specific antibody, a multispecific antibody, a grafted antibody, a human antibody, a humanized antibody, a synthetic antibody, a chimeric antibody, a camelized antibody, a single-chain Fvs (scFv) (including fragments in which the VL and VH are joined using recombinant methods by a synthetic or natural linker that enables them to be made as a single protein chain in which the VL and VH regions pair to form monovalent molecules, including single chain Fab and scFab), a single chain antibody, a Fab fragment (including monovalent fragments comprising the VL, VH, CL, and CHi domains), a F(ab′)2 fragment (including bivalent fragments comprising two Fab fragments linked by a disulfide bridge at the hinge region), a Fd fragment (including fragments comprising the VH and CHi fragment), a Fv fragment (including fragments comprising the VL and VH domains of a single arm of an antibody), a single-domain antibody (dAb or sdAb) (including fragments comprising a VH domain), an isolated complementarity determining region (CDR), a diabody (including fragments comprising bivalent dimers such as two VL and VH domains bound to each other and recognizing two different antigens), a fragment comprised of only a single monomeric variable domain, disulfide-linked Fvs (sdFv), an intrabody, an anti-idiotypic (anti-Id) antibody, or ab antigen-binding fragments thereof. In some instances, the libraries disclosed herein comprise nucleic acids encoding for an immunoglobulin, wherein the immunoglobulin is a Fv antibody, including Fv antibodies comprised of the minimum antibody fragment which contains a complete antigen-recognition and antigen-binding site. In some embodiments, the Fv antibody consists of a dimer of one heavy chain and one light chain variable domain in tight, non-covalent association, and the three hypervariable regions of each variable domain interact to define an antigen-binding site on the surface of the VH-VL dimer. In some embodiments, the six hypervariable regions confer antigen-binding specificity to the antibody. In some embodiments, a single variable domain (or half of an Fv comprising only three hypervariable regions specific for an antigen, including single domain antibodies isolated from camelid animals comprising one heavy chain variable domain such as VHH antibodies or nanobodies) has the ability to recognize and bind antigen. In some instances, the libraries disclosed herein comprise nucleic acids encoding for an immunoglobulin, wherein the immunoglobulin is a single-chain Fv or scFv, including antibody fragments comprising a VH, a VL, or both a VH and VL domain, wherein both domains are present in a single polypeptide chain. In some embodiments, the Fv polypeptide further comprises a polypeptide linker between the VH and VL domains allowing the scFv to form the desired structure for antigen binding. In some instances, a scFv is linked to the Fc fragment or a VHH is linked to the Fc fragment (including minibodies). In some instances, the antibody comprises immunoglobulin molecules and immunologically active fragments of immunoglobulin molecules, e.g., molecules that contain an antigen binding site. Immunoglobulin molecules are of any type (e.g., IgG, IgE, IgM, IgD, IgA and IgY), class (e.g., IgG 1, IgG 2, IgG 3, IgG 4, IgA 1 and IgA 2), or subclass.

[0060] In some embodiments, libraries comprise immunoglobulins that are adapted to the species of an intended therapeutic target. Generally, these methods include “mammalization” and comprise methods for transferring donor antigen-binding information to a less immunogenic mammal antibody acceptor to generate useful therapeutic treatments. In some instances, the mammal is mouse, rat, equine, sheep, cow, primate (e.g., chimpanzee, baboon, gorilla, orangutan, monkey), dog, cat, pig, donkey, rabbit, or human. In some instances, provided herein are libraries and methods for felinization and caninization of antibodies.

[0061] “Humanized” forms of non-human antibodies can be chimeric antibodies that contain minimal sequence derived from the non-human antibody. A humanized antibody is generally a human antibody (recipient antibody) in which residues from one or more CDRs are replaced by residues from one or more CDRs of a non-human antibody (donor antibody). The donor antibody can be any suitable non-human antibody, such as a mouse, rat, rabbit, chicken, or non-human primate antibody having a desired specificity, affinity, or biological effect. In some instances, selected framework region residues of the recipient antibody are replaced by the corresponding framework region residues from the donor antibody. Humanized antibodies may also comprise residues that are not found in either the recipient antibody or the donor antibody. In some instances, these modifications are made to further refine antibody performance.

[0062] “Caninization” can comprise a method for transferring non-canine antigen-binding information from a donor antibody to a less immunogenic canine antibody acceptor to generate treatments useful as therapeutics in dogs. In some instances, caninized forms of non-canine antibodies provided herein are chimeric antibodies that contain minimal sequence derived from non-canine antibodies. In some instances, caninized antibodies are canine antibody sequences (“acceptor” or “recipient” antibody) in which hypervariable region residues of the recipient are replaced by hypervariable region residues from a non-canine species (“donor” antibody) such as mouse, rat, rabbit, cat, dogs, goat, chicken, bovine, horse, llama, camel, dromedaries, sharks, non-human primates, human, humanized, recombinant sequence, or an engineered sequence having the desired properties. In some instances, framework region (FR) residues of the canine antibody are replaced by corresponding non-canine FR residues. In some instances, caninized antibodies include residues that are not found in the recipient antibody or in the donor antibody. In some instances, these modifications are made to further refine antibody performance. The caninized antibody may also comprise at least a portion of an immunoglobulin constant region (Fc) of a canine antibody.

[0063] “Felinization” can comprise a method for transferring non-feline antigen-binding information from a donor antibody to a less immunogenic feline antibody acceptor to generate treatments useful as therapeutics in cats. In some instances, felinized forms of non-feline antibodies provided herein are chimeric antibodies that contain minimal sequence derived from non-feline antibodies. In some instances, felinized antibodies are feline antibody sequences (“acceptor” or “recipient” antibody) in which hypervariable region residues of the recipient are replaced by hypervariable region residues from a non-feline species (“donor” antibody) such as mouse, rat, rabbit, cat, dogs, goat, chicken, bovine, horse, llama, camel, dromedaries, sharks, non-human primates, human, humanized, recombinant sequence, or an engineered sequence having the desired properties. In some instances, framework region (FR) residues of the feline antibody are replaced by corresponding non-feline FR residues. In some instances, felinized antibodies include residues that are not found in the recipient antibody or in the donor antibody. In some instances, these modifications are made to further refine antibody performance. The felinized antibody may also comprise at least a portion of an immunoglobulin constant region (Fc) of a felinize antibody.

[0064] Provided herein are libraries comprising nucleic acids encoding for a non-immunoglobulin. For example, the non-immunoglobulin is an antibody mimetic. Exemplary antibody mimetics include, but are not limited to, anticalins, affilins, affibody molecules, affimers, affitins, alphabodies, avimers, atrimers, DARPins, fynomers, Kunitz domain-based proteins, monobodies, anticalins, knottins, armadillo repeat protein-based proteins, and bicyclic peptides.

[0065] Libraries described herein comprising nucleic acids encoding for an immunoglobulin comprising variations in at least one region of the immunoglobulin. Exemplary regions of the antibody for variation include, but are not limited to, a complementarity-determining region (CDR), a variable domain, or a constant domain. In some instances, the CDR is CDR1, CDR2, or CDR3. In some instances, the CDR is a heavy domain including, but not limited to, CDRH1, CDRH2, and CDRH3. In some instances, the CDR is a light domain including, but not limited to, CDRL1, CDRL2, and CDRL3. In some instances, the variable domain is variable domain, light chain (VL) or variable domain, heavy chain (VH). In some instances, the VL domain comprises kappa or lambda chains. In some instances, the constant domain is constant domain, light chain (CL) or constant domain, heavy chain (CH).

[0066] Methods described herein provide for synthesis of libraries comprising nucleic acids encoding for an immunoglobulin, wherein each nucleic acid encodes for a predetermined variant of at least one predetermined reference nucleic acid sequence. In some cases, the predetermined reference sequence is a nucleic acid sequence encoding for a protein, and the variant library comprises sequences encoding for variation of at least a single codon such that a plurality of different variants of a single residue in the subsequent protein encoded by the synthesized nucleic acid are generated by standard translation processes. In some instances, the variant library comprises varied nucleic acids collectively encoding variations at multiple positions. In some instances, the variant library comprises sequences encoding for variation of at least a single codon of a CDRH1, CDRH2, CDRH3, CDRL1, CDRL2, CDRL3, VL, or VH domain. In some instances, the variant library comprises sequences encoding for variation of multiple codons of a CDRH1, CDRH2, CDRH3, CDRL1, CDRL2, CDRL3, VL, or VH domain. In some instances, the variant library comprises sequences encoding for variation of multiple codons of framework element 1 (FW1), framework element 2 (FW2), framework element 3 (FW3), or framework element 4 (FW4). An exemplary number of codons for variation include, but are not limited to, at least or about 1, 5, 10, 15, 20, 25, 30, 35, 40, 45, 50, 55, 60, 65, 70, 75, 80, 85, 90, 95, 100, 125, 150, 175, 225, 250, 275, 300, or more than 300 codons.

[0067] In some instances, the at least one region of the immunoglobulin for variation is from heavy chain V-gene family, heavy chain D-gene family, heavy chain J-gene family, light chain V-gene family, or light chain J-gene family. In some instances, the light chain V-gene family comprises immunoglobulin kappa (IGK) gene or immunoglobulin lambda (IGL). Exemplary genes include, but are not limited to, IGHV1-18, IGHV1-69, IGHV1-8, IGHV3-21, IGHV3-23, IGHV3-30/33rn, IGHV3-28, IGHV1-69, IGHV3-74, IGHV4-39, IGHV4-59/61, IGKV1-39, IGKV1-9, IGKV2-28, IGKV3-11, IGKV3-15, IGKV3-20, IGKV4-1, IGLV1-51, IGLV2-14, IGLV1-40, and IGLV3-1. In some instances, the gene is IGHV1-69, IGHV3-30, IGHV3-23, IGHV3, IGHV1-46, IGHV3-7, IGHV1, or IGHV1-8. In some instances, the gene is IGHV1-69 and IGHV3-30. In some instances, the gene is IGHJ3, IGHJ6, IGHJ, IGHJ4, IGHJ5, IGHJ2, or IGH1. In some instances, the gene is IGHJ3, IGHJ6, IGHJ, or IGHJ4.

[0068] Provided herein are libraries comprising nucleic acids encoding for immunoglobulins, wherein the libraries are synthesized with various numbers of fragments. In some instances, the fragments comprise the CDRH1, CDRH2, CDRH3, CDRL1, CDRL2, CDRL3, VL, or VH domain. In some instances, the fragments comprise framework element 1 (FW1), framework element 2 (FW2), framework element 3 (FW3), or framework element 4 (FW4). In some instances, the immunoglobulin libraries are synthesized with at least or about 2 fragments, 3 fragments, 4 fragments, 5 fragments, or more than 5 fragments. The length of each of the nucleic acid fragments or average length of the nucleic acids synthesized may be at least or about 50, 75, 100, 125, 150, 175, 200, 225, 250, 275, 300, 325, 350, 375, 400, 425, 450, 475, 500, 525, 550, 575, 600, or more than 600 base pairs. In some instances, the length is about 50 to 600, 75 to 575, 100 to 550, 125 to 525, 150 to 500, 175 to 475, 200 to 450, 225 to 425, 250 to 400, 275 to 375, or 300 to 350 base pairs.

[0069] Libraries comprising nucleic acids encoding for immunoglobulins as described herein comprise various lengths of amino acids when translated. In some instances, the length of each of the amino acid fragments or average length of the amino acid synthesized may be at least or about 15, 20, 25, 30, 35, 40, 45, 50, 55, 60, 65, 70, 75, 80, 85, 90, 95, 100, 105, 110, 115, 120, 125, 130, 135, 140, 145, 150, or more than 150 amino acids. In some instances, the length of the amino acid is about 15 to 150, 20 to 145, 25 to 140, 30 to 135, 35 to 130, 40 to 125, 45 to 120, 50 to 115, 55 to 110, 60 to 110, 65 to 105, 70 to 100, or 75 to 95 amino acids. In some instances, the length of the amino acid is about 22 amino acids to about 75 amino acids. In some instances, the immunoglobulins comprise at least or about 100, 200, 300, 400, 500, 600, 700, 800, 900, 1000, 2000, 3000, 4000, 5000, or more than 5000 amino acids.

[0070] A number of variant sequences for the at least one region of the immunoglobulin for variation are de novo synthesized using methods as described herein. In some instances, a number of variant sequences is de novo synthesized for CDRH1, CDRH2, CDRH3, CDRL1, CDRL2, CDRL3, VL, VH, or combinations thereof. In some instances, a number of variant sequences is de novo synthesized for framework element 1 (FW1), framework element 2 (FW2), framework element 3 (FW3), or framework element 4 (FW4). The number of variant sequences may be at least or about 5, 10, 15, 20, 25, 30, 35, 40, 45, 50, 55, 60, 65, 70, 75, 80, 85, 90, 95, 100, 125, 150, 175, 200, 225, 250, 275, 300, 325, 350, 375, 400, 425, 450, 475, 500, or more than 500 sequences. In some instances, the number of variant sequences is at least or about 500, 600, 700, 800, 900, 1000, 2000, 3000, 4000, 5000, 6000, 7000, 8000, or more than 8000 sequences. In some instances, the number of variant sequences is about 10 to 500, 25 to 475, 50 to 450, 75 to 425, 100 to 400, 125 to 375, 150 to 350, 175 to 325, 200 to 300, 225 to 375, 250 to 350, or 275 to 325 sequences.

[0071] Variant sequences for the at least one region of the immunoglobulin, in some instances, vary in length or sequence. In some instances, the at least one region that is de novo synthesized is for CDRH1, CDRH2, CDRH3, CDRL1, CDRL2, CDRL3, VL, VH, or combinations thereof. In some instances, the at least one region that is de novo synthesized is for framework element 1 (FW1), framework element 2 (FW2), framework element 3 (FW3), or framework element 4 (FW4). In some instances, the variant sequence comprises at least or about 1, 2, 3, 4, 5, 6, 7, 8, 9, 10, 15, 20, 25, 30, 35, 40, 45, 50, or more than 50 variant nucleotides or amino acids as compared to wild-type. In some instances, the variant sequence comprises at least or about 1, 2, 3, 4, 5, 6, 7, 8, 9, 10, 15, 20, 25, 30, 35, 40, 45, or 50 additional nucleotides or amino acids as compared to wild-type. In some instances, the variant sequence comprises at least or about 1, 2, 3, 4, 5, 6, 7, 8, 9, 10, 15, 20, 25, 30, 35, 40, 45, or 50 less nucleotides or amino acids as compared to wild-type. In some instances, the libraries comprise at least or about 10¹, 10², 10³, 10⁴, 10⁵, 10⁶, 10⁷, 10⁸, 10⁹, 10¹⁰, or more than 10¹⁰ variants.

[0072] Following synthesis of libraries described herein, libraries may be used for screening and analysis. For example, libraries are assayed for library displayability and panning. In some instances, displayability is assayed using a selectable tag. Exemplary tags include, but are not limited to, a radioactive label, a fluorescent label, an enzyme, a chemiluminescent tag, a colorimetric tag, an affinity tag or other labels or tags that are known in the art. In some instances, the tag is histidine, polyhistidine, myc, hemagglutinin (HA), or FLAG. In some instances, libraries are assayed by sequencing using various methods including, but not limited to, single-molecule real-time (SMRT) sequencing, Polony sequencing, sequencing by ligation, reversible terminator sequencing, proton detection sequencing, ion semiconductor sequencing, nanopore sequencing, electronic sequencing, pyrosequencing, Maxam-Gilbert sequencing, chain termination (e.g., Sanger) sequencing, +S sequencing, or sequencing by synthesis.

[0073] In some instances, the libraries are assayed for functional activity, structural stability (e.g., thermal stable or pH stable), expression, specificity, or a combination thereof. In some instances, the libraries are assayed for immunoglobulin (e.g., an antibody) capable of folding. In some instances, a region of the antibody is assayed for functional activity, structural stability, expression, specificity, folding, or a combination thereof. For example, a VH region or VL region is assayed for functional activity, structural stability, expression, specificity, folding, or a combination thereof.

### GLP1R Libraries

[0074] Provided herein are GLP1R binding libraries comprising nucleic acids encoding for immunoglobulins (e.g., antibodies) that bind to GLP1R. In some instances, the immunoglobulin sequences for GLP1R binding domains are determined by interactions between the GLP1R binding domains and the GLP1R.

[0075] Provided herein are libraries comprising nucleic acids encoding immunoglobulins comprising GLP1R binding domains, wherein the GLP1R binding domains are designed based on surface interactions on GLP1R. In some instances, the GLP1R comprises a sequence as defined by SEQ ID NO: 1. In some instances, the GLP1R binding domains interact with the amino- or carboxy-terminus of the GLP1R. In some instances, the GLP1R binding domains interact with at least one transmembrane domain including, but not limited to, transmembrane domain 1 (TM1), transmembrane domain 2 (TM2), transmembrane domain 3 (TM3), transmembrane domain 4 (TM4), transmembrane domain 5 (TM5), transmembrane domain 6 (TM6), and transmembrane domain 7 (TM7). In some instances, the GLP1R binding domains interact with an intracellular surface of the GLP1R. For example, the GLP1R binding domains interact with at least one intracellular loop including, but not limited to, intracellular loop 1 (ICL1), intracellular loop 2 (ICL2), and intracellular loop 3 (ICL3). In some instances, the GLP1R binding domains interact with an extracellular surface of the GLP1R. For example, the GLP1R binding domains interact with at least one extracellular domain (ECD) or extracellular loop (ECL) of the GLP1R. The extracellular loops include, but are not limited to, extracellular loop 1 (ECL1), extracellular loop 2 (ECL2), and extracellular loop 3 (ECL3).

[0076] Described herein are GLP1R binding domains, wherein the GLP1R binding domains are designed based on surface interactions between a GLP1R ligand and the GLP1R. In some instances, the ligand is a peptide. In some instances, the ligand is glucagon, glucagon-like peptide 1-(7-36) amide, glucagon-like peptide 1-(7-37), liraglutide, exendin-4, lixisenatide, T-0632, GLP1R0017, or BETP. In some instances, the ligand is a GLP1R agonist. In some instances, the ligand is a GLP1R antagonist. In some instances, the ligand is a GLP1R allosteric modulator. In some instances, the allosteric modulator is a negative allosteric modulator. In some instances, the allosteric modulator is a positive allosteric modulator.

[0077] Sequences of GLP1R binding domains based on surface interactions between a GLP1R ligand and the GLP1R are analyzed using various methods. For example, multispecies computational analysis is performed. In some instances, a structure analysis is performed. In some instances, a sequence analysis is performed. Sequence analysis can be performed using a database known in the art. Non-limiting examples of databases include, but are not limited to, NCBI BLAST (blast.ncbi.nlm.nih.gov/Blast.cgi), UCSC Genome Browser (genome.ucsc.edu/), UniProt (uniprot.org/), and IUPHAR/BPS Guide to PHARMACOLOGY (guidetopharmacology.org/).

[0078] Described herein are GLP1R binding domains designed based on sequence analysis among various organisms. For example, sequence analysis is performed to identify homologous sequences in different organisms. Exemplary organisms include, but are not limited to, mouse, rat, equine, sheep, cow, primate (e.g., chimpanzee, baboon, gorilla, orangutan, monkey), dog, cat, pig, donkey, rabbit, fish, fly, and human.

[0079] Following identification of GLP1R binding domains, libraries comprising nucleic acids encoding for the GLP1R binding domains may be generated. In some instances, libraries of GLP1R binding domains comprise sequences of GLP1R binding domains designed based on conformational ligand interactions, peptide ligand interactions, small molecule ligand interactions, extracellular domains of GLP1R, or antibodies that target GLP1R. In some instances, libraries of GLP1R binding domains comprise sequences of GLP1R binding domains designed based on peptide ligand interactions. Libraries of GLP1R binding domains may be translated to generate protein libraries. In some instances, libraries of GLP1R binding domains are translated to generate peptide libraries, immunoglobulin libraries, derivatives thereof, or combinations thereof. In some instances, libraries of GLP1R binding domains are translated to generate protein libraries that are further modified to generate peptidomimetic libraries. In some instances, libraries of GLP1R binding domains are translated to generate protein libraries that are used to generate small molecules.

[0080] Methods described herein provide for synthesis of libraries of GLP1R binding domains comprising nucleic acids each encoding for a predetermined variant of at least one predetermined reference nucleic acid sequence. In some cases, the predetermined reference sequence is a nucleic acid sequence encoding for a protein, and the variant library comprises sequences encoding for variation of at least a single codon such that a plurality of different variants of a single residue in the subsequent protein encoded by the synthesized nucleic acid are generated by standard translation processes. In some instances, the libraries of GLP1R binding domains comprise varied nucleic acids collectively encoding variations at multiple positions. In some instances, the variant library comprises sequences encoding for variation of at least a single codon in a GLP1R binding domain. In some instances, the variant library comprises sequences encoding for variation of multiple codons in a GLP1R binding domain. An exemplary number of codons for variation include, but are not limited to, at least or about 1, 5, 10, 15, 20, 25, 30, 35, 40, 45, 50, 55, 60, 65, 70, 75, 80, 85, 90, 95, 100, 125, 150, 175, 225, 250, 275, 300, or more than 300 codons.

[0081] Methods described herein provide for synthesis of libraries comprising nucleic acids encoding for the GLP1R binding domains, wherein the libraries comprise sequences encoding for variation of length of the GLP1R binding domains. In some instances, the library comprises sequences encoding for variation of length of at least or about 1, 5, 10, 15, 20, 25, 30, 35, 40, 45, 50, 55, 60, 65, 70, 75, 80, 85, 90, 95, 100, 125, 150, 175, 225, 250, 275, 300, or more than 300 codons less as compared to a predetermined reference sequence. In some instances, the library comprises sequences encoding for variation of length of at least or about 1, 5, 10, 15, 20, 25, 30, 35, 40, 45, 50, 55, 60, 65, 70, 75, 80, 85, 90, 95, 100, 125, 150, 175, 200, 225, 250, 275, 300, or more than 300 codons more as compared to a predetermined reference sequence.

[0082] Following identification of GLP1R binding domains, the GLP1R binding domains may be placed in immunoglobulins as described herein. In some instances, the GLP1R binding domains are placed in the CDRH3 region. GPCR binding domains that may be placed in immunoglobulins can also be referred to as a motif. Immunoglobulins comprising GLP1R binding domains may be designed based on binding, specificity, stability, expression, folding, or downstream activity. In some instances, the immunoglobulins comprising GLP1R binding domains enable contact with the GLP1R. In some instances, the immunoglobulins comprising GLP1R binding domains enables high affinity binding with the GLP1R. An exemplary amino acid sequence of GLP1R binding domain is described in Table 1.

TABLE 1
GLP1R amino acid sequences

| SEQ | | |
|---|---|---|
| ID | | |
| NO | GPCR | Amino Acid Sequence |
| 1352 | GLP1R | RPQGATVSLWETVQKWREYRRQCQRSLTEDPPPATDLFCNRTFDEYA |
| | | CWPDGEPGSFVNVSCPWYLPWASSVPQGHVYRFCTAEGLWLQKDNS |
| | | SLPWRDLSECEESKRGERSSPEEQLLFLYIIYTVGYALSFSALVIASAIL |
| | | LGFRHLHCTRNYIHLNLFASFILRALSVFIKDAALKWMYSTAAQQHQ |
| | | WDGLLSYQDSLSCRLVFLLMQYCVAANYYWLLVEGVYLYTLLAFSV |
| | | LSEQWIFRLYVSIGWGVPLLFVVPWGIVKYLYEDEGCWTRNSNMNY |
| | | WLIIRLPILFAIGVNFLIFVRVICIVVSKLKANLMCKTDIKCRLAKSTLT |
| | | LIPLLGTHEVIFAFVMDEHARGTLRFIKLFTELSFTSFQGLMVAILYCF |
| | | VNNEVQLEFRKSWERWRLEHLHIQRDSSMKPLKCPTSSLSSGATAGS |
| | | SMYTATCQASCS |

[0083] Provided herein are immunoglobulins comprising GLP1R binding domains, wherein the sequences of the GLP1R binding domains support interaction with GLP1R. The sequence may be homologous or identical to a sequence of a GLP1R ligand. In some instances, the GLP1R binding domain sequence comprises at least or about 70%, 80%, 85%, 90%, 91%, 92%, 93%, 94%, 95%, 96%, 97%, 98%, 99%, or 100% sequence identity to SEQ ID NO: 1. In some instances, the GLP1R binding domain sequence comprises at least or about 95% homology to SEQ ID NO: 1. In some instances, the GLP1R binding domain sequence comprises at least or about 97% homology to SEQ ID NO: 1. In some instances, the GLP1R binding domain sequence comprises at least or about 99% homology to SEQ ID NO: 1. In some instances, the GLP1R binding domain sequence comprises at least or about 100% homology to SEQ ID NO: 1. In some instances, the GLP1R binding domain sequence comprises at least a portion having at least or about 10, 20, 30, 40, 50, 60, 70, 80, 90, 100, 110, 120, 130, 140, 150, 160, 170, 180, 190, 200, 210, 220, 230, 240, 250, 260, 270, 280, 290, 300, 310, 320, 330, 340, 350, 360, 370, 380, 390, 400, or more than 400 amino acids of SEQ ID NO: 1.

[0084] The term “sequence identity” means that two polynucleotide sequences are identical (i.e., on a nucleotide-by-nucleotide basis) over the window of comparison. The term “percentage of sequence identity” is calculated by comparing two optimally aligned sequences over the window of comparison, determining the number of positions at which the identical nucleic acid base (e.g., A, T, C, G, U, or I) occurs in both sequences to yield the number of matched positions, dividing the number of matched positions by the total number of positions in the window of comparison (i.e., the window size), and multiplying the result by 100 to yield the percentage of sequence identity. Alignment for purposes of determining percent amino acid sequence identity can be achieved in various ways that are within the skill in the art, for instance, using publicly available computer software such as EMBOSS MATCHER, EMBOSS WATER, EMBOSS STRETCHER, EMBOSS NEEDLE, EMBOSS LALIGN, BLAST, BLAST-2, ALIGN or Megalign (DNASTAR) software. Those skilled in the art can determine appropriate parameters for measuring alignment, including any algorithms needed to achieve maximal alignment over the full length of the sequences being compared.

[0085] In situations where ALIGN-2 is employed for amino acid sequence comparisons, the % amino acid sequence identity of a given amino acid sequence A to, with, or against a given amino acid sequence B (which can alternatively be phrased as a given amino acid sequence A that has or comprises a certain % amino acid sequence identity to, with, or against a given amino acid sequence B) is calculated as follows: 100 times the fraction X/Y, where X is the number of amino acid residues scored as identical matches by the sequence alignment program ALIGN-2 in that program's alignment of A and B, and where Y is the total number of amino acid residues in B. It will be appreciated that where the length of amino acid sequence A is not equal to the length of amino acid sequence B, the % amino acid sequence identity of A to B will not equal the % amino acid sequence identity of B to A. Unless specifically stated otherwise, all % amino acid sequence identity values used herein are obtained as described in the immediately preceding paragraph using the ALIGN-2 computer program.

[0086] The term “homology” or “similarity” between two proteins is determined by comparing the amino acid sequence and its conserved amino acid substitutes of one protein sequence to the second protein sequence. Similarity may be determined by procedures which are well-known in the art, for example, a BLAST program (Basic Local Alignment Search Tool at the National Center for Biological Information).

[0087] The terms “complementarity determining region,” and “CDR,” which are synonymous with “hypervariable region” or “HVR,” are known in the art to refer to non-contiguous sequences of amino acids within antibody variable regions, which confer antigen specificity and/or binding affinity. In general, there are three CDRs in each heavy chain variable region (CDRH1, CDRH2, CDRH3) and three CDRs in each light chain variable region (CDRL1, CDRL2, CDRL3). “Framework regions” and “FR” are known in the art to refer to the non-CDR portions of the variable regions of the heavy and light chains. In general, there are four FRs in each full-length heavy chain variable region (FR-H1, FR-H2, FR-H3, and FR-H4), and four FRs in each full-length light chain variable region (FR-L1, FR-L2, FR-L3, and FR-L4). The precise amino acid sequence boundaries of a given CDR or FR can be readily determined using any of a number of well-known schemes, including those described by Kabat et al. (1991), “Sequences of Proteins of Immunological Interest,” 5th Ed. Public Health Service, National Institutes of Health, Bethesda, MD (“Kabat” numbering scheme), Al-Lazikani et al., (1997) JMB 273,927-948 (“Chothia” numbering scheme); MacCallum et al., J. Mol. Biol. 262:732-745 (1996), “Antibody-antigen interactions: Contact analysis and binding site topography,” J. Mol. Biol. 262, 732-745.” (“Contact” numbering scheme); Lefranc M P et al., “IMGT unique numbering for immunoglobulin and T cell receptor variable domains and Ig superfamily V-like domains,” Dev Comp Immunol, 2003 January; 27(i):55-77 (“IMGT” numbering scheme); Honegger A and Plückthun A, “Yet another numbering scheme for immunoglobulin variable domains: an automatic modeling and analysis tool,” J Mol Biol, 2001 Jun. 8; 309(3):657-70, (“Aho” numbering scheme); and Whitelegg N R and Rees A R, “WAM: an improved algorithm for modelling antibodies on the WEB,” Protein Eng. 2000 December; 13(12):819-24 (“AbM” numbering scheme. In certain embodiments the CDRs of the antibodies described herein can be defined by a method selected from Kabat, Chothia, IMGT, Aho, AbM, or combinations thereof.

[0088] The boundaries of a given CDR or FR may vary depending on the scheme used for identification. For example, the Kabat scheme is based on structural alignments, while the Chothia scheme is based on structural information. Numbering for both the Kabat and Chothia schemes is based upon the most common antibody region sequence lengths, with insertions accommodated by insertion letters, for example, “30a,” and deletions appearing in some antibodies. The two schemes place certain insertions and deletions (“indels”) at different positions, resulting in differential numbering. The Contact scheme is based on analysis of complex crystal structures and is similar in many respects to the Chothia numbering scheme.

[0089] Provided herein are GLP1R binding libraries comprising nucleic acids encoding for immunoglobulins comprising GLP1R binding domains comprise variation in domain type, domain length, or residue variation. In some instances, the domain is a region in the immunoglobulin comprising the GLP1R binding domains. For example, the region is the VH, CDRH3, or VL domain. In some instances, the domain is the GLP1R binding domain.

[0090] Methods described herein provide for synthesis of a GLP1R binding library of nucleic acids each encoding for a predetermined variant of at least one predetermined reference nucleic acid sequence. In some cases, the predetermined reference sequence is a nucleic acid sequence encoding for a protein, and the variant library comprises sequences encoding for variation of at least a single codon such that a plurality of different variants of a single residue in the subsequent protein encoded by the synthesized nucleic acid are generated by standard translation processes. In some instances, the GLP1R binding library comprises varied nucleic acids collectively encoding variations at multiple positions. In some instances, the variant library comprises sequences encoding for variation of at least a single codon of a VH, CDRH3, or VL domain. In some instances, the variant library comprises sequences encoding for variation of at least a single codon in a GLP1R binding domain. For example, at least one single codon of a GLP1R binding domain as listed in Table 1 is varied. In some instances, the variant library comprises sequences encoding for variation of multiple codons of a VH, CDRH3, or VL domain. In some instances, the variant library comprises sequences encoding for variation of multiple codons in a GLP1R binding domain. An exemplary number of codons for variation include, but are not limited to, at least or about 1, 5, 10, 15, 20, 25, 30, 35, 40, 45, 50, 55, 60, 65, 70, 75, 80, 85, 90, 95, 100, 125, 150, 175, 225, 250, 275, 300, or more than 300 codons.

[0091] Methods described herein provide for synthesis of a GLP1R binding library of nucleic acids each encoding for a predetermined variant of at least one predetermined reference nucleic acid sequence, wherein the GLP1R binding library comprises sequences encoding for variation of length of a domain. In some instances, the domain is VH, CDRH3, or VL domain. In some instances, the domain is the GLP1R binding domain. In some instances, the library comprises sequences encoding for variation of length of at least or about 1, 5, 10, 15, 20, 25, 30, 35, 40, 45, 50, 55, 60, 65, 70, 75, 80, 85, 90, 95, 100, 125, 150, 175, 225, 250, 275, 300, or more than 300 codons less as compared to a predetermined reference sequence. In some instances, the library comprises sequences encoding for variation of length of at least or about 1, 5, 10, 15, 20, 25, 30, 35, 40, 45, 50, 55, 60, 65, 70, 75, 80, 85, 90, 95, 100, 125, 150, 175, 200, 225, 250, 275, 300, or more than 300 codons more as compared to a predetermined reference sequence.

[0092] Provided herein are GLP1R binding libraries comprising nucleic acids encoding for immunoglobulins comprising GLP1R binding domains, wherein the GLP1R binding libraries are synthesized with various numbers of fragments. In some instances, the fragments comprise the VH, CDRH3, or VL domain. In some instances, the GLP1R binding libraries are synthesized with at least or about 2 fragments, 3 fragments, 4 fragments, 5 fragments, or more than 5 fragments. The length of each of the nucleic acid fragments or average length of the nucleic acids synthesized may be at least or about 50, 75, 100, 125, 150, 175, 200, 225, 250, 275, 300, 325, 350, 375, 400, 425, 450, 475, 500, 525, 550, 575, 600, or more than 600 base pairs. In some instances, the length is about 50 to 600, 75 to 575, 100 to 550, 125 to 525, 150 to 500, 175 to 475, 200 to 450, 225 to 425, 250 to 400, 275 to 375, or 300 to 350 base pairs.

[0093] GLP1R binding libraries comprising nucleic acids encoding for immunoglobulins comprising GLP1R binding domains as described herein comprise various lengths of amino acids when translated. In some instances, the length of each of the amino acid fragments or average length of the amino acid synthesized may be at least or about 15, 20, 25, 30, 35, 40, 45, 50, 55, 60, 65, 70, 75, 80, 85, 90, 95, 100, 105, 110, 115, 120, 125, 130, 135, 140, 145, 150, or more than 150 amino acids. In some instances, the length of the amino acid is about 15 to 150, 20 to 145, 25 to 140, 30 to 135, 35 to 130, 40 to 125, 45 to 120, 50 to 115, 55 to 110, 60 to 110, 65 to 105, 70 to 100, or 75 to 95 amino acids. In some instances, the length of the amino acid is about 22 to about 75 amino acids.

[0094] GLP1R binding libraries comprising de novo synthesized variant sequences encoding for immunoglobulins comprising GLP1R binding domains comprise a number of variant sequences. In some instances, a number of variant sequences is de novo synthesized for a CDRH1, CDRH2, CDRH3, CDRL1, CDRL2, CDRL3, VL, VH, or a combination thereof. In some instances, a number of variant sequences is de novo synthesized for framework element 1 (FW1), framework element 2 (FW2), framework element 3 (FW3), or framework element 4 (FW4). In some instances, a number of variant sequences is de novo synthesized for a GPCR binding domain. For example, the number of variant sequences is about 1 to about 10 sequences for the VH domain, about 10⁸ sequences for the GLP1R binding domain, and about 1 to about 44 sequences for the VK domain. The number of variant sequences may be at least or about 5, 10, 15, 20, 25, 30, 35, 40, 45, 50, 55, 60, 65, 70, 75, 80, 85, 90, 95, 100, 125, 150, 175, 200, 225, 250, 275, 300, 325, 350, 375, 400, 425, 450, 475, 500, or more than 500 sequences. In some instances, the number of variant sequences is about 10 to 300, 25 to 275, 50 to 250, 75 to 225, 100 to 200, or 125 to 150 sequences.

[0095] Described herein are antibodies or antibody fragments thereof that binds GLP1R. In some embodiments, the antibody or antibody fragment thereof comprises a sequence as set forth in Tables 7-13. In some embodiments, the antibody or antibody fragment thereof comprises a sequence that is at least or about 70%, 80%, 85%, 90%, 91%, 92%, 93%, 94%, 95%, 96%, 97%, 98%, 99%, or 100% sequence identity to a sequence as set forth in Tables 7-13.

[0096] In some instances, an antibody or antibody fragment described herein comprises a CDRH1 sequence of any one of SEQ ID NOs: 441-619. In some instances, an antibody or antibody fragment described herein comprises a sequence that is at least 80% identical to a CDRH1 sequence of any one of SEQ ID NOs: 441-619. In some instances, an antibody or antibody fragment described herein comprises a sequence that is at least 85% identical to a CDRH1 sequence of any one of SEQ ID NOs: 441-619. In some instances, an antibody or antibody fragment described herein comprises a sequence that is at least 90% identical to a CDRH1 sequence of any one of SEQ ID NOs: 441-619. In some instances, an antibody or antibody fragment described herein comprises a sequence that is at least 95% identical to a CDRH1 sequence of any one of SEQ ID NOs: 441-619. In some instances, an antibody or antibody fragment described herein comprises a CDRH2 sequence of any one of SEQ ID NOs: 620-798. In some instances, an antibody or antibody fragment described herein comprises a sequence that is at least 80% identical to a CDRH2 sequence of any one of SEQ ID NOs: 620-798. In some instances, an antibody or antibody fragment described herein comprises a sequence that is at least 85% identical to a CDRH2 sequence of any one of SEQ ID NOs: 620-798. In some instances, an antibody or antibody fragment described herein comprises a sequence that is at least 90% identical to a CDRH2 sequence of any one of SEQ ID NOs: 620-798. In some instances, an antibody or antibody fragment described herein comprises a sequence that is at least 95% identical to a CDRH2 sequence of any one of SEQ ID NOs: 620-798. In some instances, an antibody or antibody fragment described herein comprises a CDRH3 sequence of any one of SEQ ID NOs: 799-977. In some instances, an antibody or antibody fragment described herein comprises a sequence that is at least 80% identical to a CDRH3 sequence of any one of SEQ ID NOs: 799-977. In some instances, an antibody or antibody fragment described herein comprises a sequence that is at least 85% identical to a CDRH3 sequence of any one of SEQ ID NOs: 799-977. In some instances, an antibody or antibody fragment described herein comprises a sequence that is at least 90% identical to a CDRH3 sequence of any one of SEQ ID NOs: 799-977. In some instances, an antibody or antibody fragment described herein comprises a sequence that is at least 95% identical to a CDRH3 sequence of any one of SEQ ID NOs: 799-977.

[0097] In some instances, an antibody or antibody fragment described herein comprises a CDRL1 sequence of any one of SEQ ID NOs: 978-1156. In some instances, an antibody or antibody fragment described herein comprises a sequence that is at least 80% identical to a CDRL1 sequence of any one of SEQ ID NOs: 978-1156. In some instances, an antibody or antibody fragment described herein comprises a sequence that is at least 85% identical to a CDRL1 sequence of any one of SEQ ID NOs: 978-1156. In some instances, an antibody or antibody fragment described herein comprises a sequence that is at least 90% identical to a CDRL1 sequence of any one of SEQ ID NOs: 978-1156. In some instances, an antibody or antibody fragment described herein comprises a sequence that is at least 95% identical to a CDRL1 sequence of any one of SEQ ID NOs: 978-1156. In some instances, an antibody or antibody fragment described herein comprises a CDRL2 sequence of any one of SEQ ID NOs: 1157-1335. In some instances, an antibody or antibody fragment described herein comprises a sequence that is at least 80% identical to a CDRL2 sequence of any one of SEQ ID NOs: 1157-1335. In some instances, an antibody or antibody fragment described herein comprises a sequence that is at least 85% identical to a CDRL2 sequence of any one of SEQ ID NOs: 1157-1335. In some instances, an antibody or antibody fragment described herein comprises a sequence that is at least 90% identical to a CDRL2 sequence of any one of SEQ ID NOs: 1157-1335. In some instances, an antibody or antibody fragment described herein comprises a sequence that is at least 95% identical to a CDRL2 sequence of any one of SEQ ID NOs: 1157-1335. In some instances, an antibody or antibody fragment described herein comprises a CDRL3 sequence of any one of SEQ ID NOs: 1336-1347 and 1353-1519. In some instances, an antibody or antibody fragment described herein comprises a sequence that is at least 80% identical to a CDRL3 sequence of any one of SEQ ID NOs: 1336-1347 and 1353-1519. In some instances, an antibody or antibody fragment described herein comprises a sequence that is at least 85% identical to a CDRL3 sequence of any one of SEQ ID NOs: 1336-1347 and 1353-1519. In some instances, an antibody or antibody fragment described herein comprises a sequence that is at least 90% identical to a CDRL3 sequence of any one of SEQ ID NOs: 1336-1347 and 1353-1519. In some instances, an antibody or antibody fragment described herein comprises a sequence that is at least 95% identical to a CDRL3 sequence of any one of SEQ ID NOs: 1336-1347 and 1353-1519.

[0098] In some embodiments, the antibody or antibody fragment comprising a variable domain, heavy chain region (VH) and a variable domain, light chain region (VL), wherein VH comprises complementarity determining regions CDRH1, CDRH2, and CDRH3, wherein VL comprises complementarity determining regions CDRL1, CDRL2, and CDRL3, and wherein (a) an amino acid sequence of CDRH1 is as set forth in any one of SEQ ID NOs: 441-619; (b) an amino acid sequence of CDRH2 is as set forth in any one of SEQ ID NOs: 620-798; (c) an amino acid sequence of CDRH3 is as set forth in any one of SEQ ID NOs: 799-977; (d) an amino acid sequence of CDRL1 is as set forth in any one of SEQ ID NOs: 978-1156; (e) an amino acid sequence of CDRL2 is as set forth in any one of SEQ ID NOs: 1157-1335; and (f) an amino acid sequence of CDRL3 is as set forth in any one of SEQ ID NOs: 1336-1347 and 1353-1519. In some embodiments, the antibody or antibody fragment comprising a variable domain, heavy chain region (VH) and a variable domain, light chain region (VL), wherein VH comprises complementarity determining regions CDRH1, CDRH2, and CDRH3, wherein VL comprises complementarity determining regions CDRL1, CDRL2, and CDRL3, and wherein (a) an amino acid sequence of CDRH1 is at least or about 80%, 85%, 90%, or 95% identical to any one of SEQ ID NOs: 441-619; (b) an amino acid sequence of CDRH2 is at least or about 80%, 85%, 90%, or 95% identical to any one of SEQ ID NOs: 620-798; (c) an amino acid sequence of CDRH3 is at least or about 80%, 85%, 90%, or 95% identical to any one of SEQ ID NOs: 799-977; (d) an amino acid sequence of CDRL1 is at least or about 80%, 85%, 90%, or 95% identical to any one of SEQ ID NOs: 978-1156; (e) an amino acid sequence of CDRL2 is at least or about 80%, 85%, 90%, or 95% identical to any one of SEQ ID NOs: 1157-1335; and (f) an amino acid sequence of CDRL3 is at least or about 80%, 85%, 90%, or 95% identical to any one of SEQ ID NOs: 1336-1347 and 1353-1519.

[0099] Described herein, in some embodiments, are antibodies or antibody fragments comprising a variable domain, heavy chain region (VH) and a variable domain, light chain region (VL), wherein the VH comprises an amino acid sequence at least about 90% identical to a sequence as set forth in any one of SEQ ID NOs: 58-77, and wherein the VL comprises an amino acid sequence at least about 90% identical to a sequence as set forth in any one of SEQ ID NOs: 92-111. In some instances, the antibodies or antibody fragments comprise VH comprising at least or about 70%, 80%, 85%, 90%, 91%, 92%, 93%, 94%, 95%, 96%, 97%, 98%, 99%, or 100% sequence identity to any one of SEQ ID NOs: 58-77, and VL comprising at least or about 70%, 80%, 85%, 90%, 91%, 92%, 93%, 94%, 95%, 96%, 97%, 98%, 99%, or 100% sequence identity to any one of SEQ ID NOs: 92-111.

[0100] The term “sequence identity” means that two polynucleotide sequences are identical (i.e., on a nucleotide-by-nucleotide basis) over the window of comparison. The term “percentage of sequence identity” is calculated by comparing two optimally aligned sequences over the window of comparison, determining the number of positions at which the identical nucleic acid base (e.g., A, T, C, G, U, or I) occurs in both sequences to yield the number of matched positions, dividing the number of matched positions by the total number of positions in the window of comparison (i.e., the window size), and multiplying the result by 100 to yield the percentage of sequence identity. Typically, techniques for determining sequence identity include comparing two nucleotide or amino acid sequences and determining their percent identity. Sequence comparisons, such as for the purpose of assessing identities, may be performed by any suitable alignment algorithm, including but not limited to the Needleman-Wunsch algorithm (see, e.g., the EMBOSS Needle aligner available at ebi.ac.uk/Tools/psa/emboss_needle/, optionally with default settings), the BLAST algorithm (see, e.g., the BLAST alignment tool available at blast.ncbi.nlm.nih.gov/Blast.cgi, optionally with default settings), and the Smith-Waterman algorithm (see, e.g., the EMBOSS Water aligner available at ebi.ac.uk/Tools/psa/emboss_water/, optionally with default settings). Optimal alignment may be assessed using any suitable parameters of a chosen algorithm, including default parameters. The “percent identity”, also referred to as “percent homology”, between two sequences may be calculated as the number of exact matches between two optimally aligned sequences divided by the length of the reference sequence and multiplied by 100. Percent identity may also be determined, for example, by comparing sequence information using the advanced BLAST computer program, including version 2.2.9, available from the National Institutes of Health. The BLAST program is based on the alignment method of Karlin and Altschul, Proc. Natl. Acad. Sci. USA 87:2264-2268 (1990) and as discussed in Altschul, et al., J. Mol. Biol. 215:403-410 (1990); Karlin and Altschul, Proc. Natl. Acad. Sci. USA 90:5873-5877 (1993); and Altschul et al., Nucleic Acids Res. 25:3389-3402 (1997). Briefly, the BLAST program defines identity as the number of identical aligned symbols (i.e., nucleotides or amino acids), divided by the total number of symbols in the shorter of the two sequences. The program may be used to determine percent identity over the entire length of the sequences being compared. Default parameters are provided to optimize searches with short query sequences, for example, with the blastp program. The program also allows use of an SEG filter to mask-off segments of the query sequences as determined by the SEG program of Wootton and Federhen, Computers and Chemistry 17: 149-163 (1993). High sequence identity generally includes ranges of sequence identity of approximately 80% to 100% and integer values there between.

[0101] GLP1R binding libraries comprising de novo synthesized variant sequences encoding for immunoglobulins comprising GLP1R binding domains comprise improved diversity. For example, variants are generated by placing GLP1R binding domain variants in immunoglobulins comprising N-terminal CDRH3 variations and C-terminal CDRH3 variations. In some instances, variants include affinity maturation variants. Alternatively or in combination, variants include variants in other regions of the immunoglobulin including, but not limited to, CDRH1, CDRH2, CDRL1, CDRL2, and CDRL3. In some instances, the number of variants of the GLP1R binding libraries is at least or about 10⁴, 10⁵, 10⁶, 10⁷, 10⁸, 10⁹, 10¹⁰, 10¹¹, 10¹², 10¹³, 10¹⁴, 10¹⁵, 10¹⁶, 10¹⁷, 10¹⁸, 10¹⁹, 10²⁰, or more than 10²⁰ non-identical sequences. For example, a library comprising about 10 variant sequences for a VH region, about 237 variant sequences for a CDRH3 region, and about 43 variant sequences for a VL and CDRL3 region comprises 105 non-identical sequences (10×237×43).

[0102] In some instances, the at least one region of the antibody for variation is from heavy chain V-gene family, heavy chain D-gene family, heavy chain J-gene family, light chain V-gene family, or light chain J-gene family. In some instances, the light chain V-gene family comprises immunoglobulin kappa (IGK) gene or immunoglobulin lambda (IGL). Exemplary regions of the antibody for variation include, but are not limited to, IGHV1-18, IGHV1-69, IGHV1-8, IGHV3-21, IGHV3-23, IGHV3-30/33rn, IGHV3-28, IGHV1-69, IGHV3-74, IGHV4-39, IGHV4-59/61, IGKV1-39, IGKV1-9, IGKV2-28, IGKV3-11, IGKV3-15, IGKV3-20, IGKV4-1, IGLV1-51, IGLV2-14, IGLV1-40, and IGLV3-1. In some instances, the gene is IGHV1-69, IGHV3-30, IGHV3-23, IGHV3, IGHV1-46, IGHV3-7, IGHV1, or IGHV1-8. In some instances, the gene is IGHV1-69 and IGHV3-30. In some instances, the region of the antibody for variation is IGHJ3, IGHJ6, IGHJ, IGHJ4, IGHJ5, IGHJ2, or IGH1. In some instances, the region of the antibody for variation is IGHJ3, IGHJ6, IGHJ, or IGHJ4. In some instances, the at least one region of the antibody for variation is IGHV1-69, IGHV3-23, IGKV3-20, IGKV1-39, or combinations thereof. In some instances, the at least one region of the antibody for variation is IGHV1-69 and IGKV3-20, In some instances, the at least one region of the antibody for variation is IGHV1-69 and IGKV1-39. In some instances, the at least one region of the antibody for variation is IGHV3-23 and IGKV3-20. In some instances, the at least one region of the antibody for variation is IGHV3-23 and IGKV1-39.

[0103] Provided herein are libraries comprising nucleic acids encoding for a GLP1R antibody comprising variation in at least one region of the antibody, wherein the region is the CDR region. In some instances, the GLP1R antibody is a single domain antibody comprising one heavy chain variable domain such as a VHH antibody. In some instances, the VHH antibody comprises variation in one or more CDR regions. In some instances, libraries described herein comprise at least or about 1, 10, 20, 30, 40, 50, 60, 70, 80, 90, 100, 200, 300, 400, 500, 600, 700, 800, 900, 1000, 1200, 1400, 1600, 1800, 2000, 2400, 2600, 2800, 3000, or more than 3000 sequences of a CDR1, CDR2, or CDR3. In some instances, libraries described herein comprise at least or about 10⁴, 10⁵, 10⁶, 10⁷, 10⁸, 10⁹, 10¹⁰, 10¹¹, 10¹², 10¹³, 10¹⁴, 10¹⁵, 10¹⁶, 10¹⁷, 10¹⁸, 10¹⁹, 10²⁰, or more than 10²⁰ sequences of a CDR1, CDR2, or CDR3. For example, the libraries comprise at least 2000 sequences of a CDR1, at least 1200 sequences for CDR2, and at least 1600 sequences for CDR3. In some instances, each sequence is non-identical.

[0104] In some instances, the CDR1, CDR2, or CDR3 is of a variable domain, light chain (VL). CDR1, CDR2, or CDR3 of a variable domain, light chain (VL) can be referred to as CDRL1, CDRL2, or CDRL3, respectively. In some instances, libraries described herein comprise at least or about 1, 2, 3, 4, 5, 6, 7, 8, 9, 10, 20, 30, 40, 50, 60, 70, 80, 90, 100, 200, 300, 400, 500, 600, 700, 800, 900, 1000, 1200, 1400, 1600, 1800, 2000, 2400, 2600, 2800, 3000, or more than 3000 sequences of a CDR1, CDR2, or CDR3 of the VL. In some instances, libraries described herein comprise at least or about 10⁴, 10⁵, 10⁶, 10⁷, 10⁸, 10⁹, 10¹⁰, 10¹¹, 10¹², 10¹³, 10¹⁴, 10¹⁵, 10¹⁶, 10¹⁷, 10¹⁸, 10¹⁹, 10²⁰, or more than 10²⁰ sequences of a CDR1, CDR2, or CDR3 of the VL. For example, the libraries comprise at least 20 sequences of a CDR1 of the VL, at least 4 sequences of a CDR2 of the VL, and at least 140 sequences of a CDR3 of the VL. In some instances, the libraries comprise at least 2 sequences of a CDR1 of the VL, at least 1 sequence of CDR2 of the VL, and at least 3000 sequences of a CDR3 of the VL. In some instances, the VL is IGKV1-39, IGKV1-9, IGKV2-28, IGKV3-11, IGKV3-15, IGKV3-20, IGKV4-1, IGLV1-51, IGLV2-14, IGLV1-40, or IGLV3-1. In some instances, the VL is IGKV2-28. In some instances, the VL is IGLV1-51.

[0105] In some instances, the CDR1, CDR2, or CDR3 is of a variable domain, heavy chain (VH). CDR1, CDR2, or CDR3 of a variable domain, heavy chain (VH) can be referred to as CDRH1, CDRH2, or CDRH3, respectively. In some instances, libraries described herein comprise at least or about 1, 2, 3, 4, 5, 6, 7, 8, 9, 10, 20, 30, 40, 50, 60, 70, 80, 90, 100, 200, 300, 400, 500, 600, 700, 800, 900, 1000, 1200, 1400, 1600, 1800, 2000, 2400, 2600, 2800, 3000, or more than 3000 sequences of a CDR1, CDR2, or CDR3 of the VH. In some instances, libraries described herein comprise at least or about 10⁴, 10⁵, 10⁶, 10⁷, 10⁸, 10⁹, 10¹⁰, 10¹¹, 10¹², 10¹³, 10¹⁴, 10¹⁵, 10¹⁶, 10¹⁷, 10¹8, 10¹⁹, 10²⁰, or more than 10²⁰ sequences of a CDR1, CDR2, or CDR3 of the VH. For example, the libraries comprise at least 30 sequences of a CDR1 of the VH, at least 570 sequences of a CDR2 of the VH, and at least 10⁸ sequences of a CDR3 of the VH. In some instances, the libraries comprise at least 30 sequences of a CDR1 of the VH, at least 860 sequences of a CDR2 of the VH, and at least 10⁷ sequences of a CDR3 of the VH. In some instances, the VH is IGHV1-18, IGHV1-69, IGHV1-8 IGHV3-21, IGHV3-23, IGHV3-30/33rn, IGHV3-28, IGHV3-74, IGHV4-39, or IGHV4-59/61. In some instances, the VH is IGHV1-69, IGHV3-30, IGHV3-23, IGHV3, IGHV1-46, IGHV3-7, IGHV1, or IGHV1-8. In some instances, the VH is IGHV1-69 or IGHV3-30. In some instances, the VH is IGHV3-23.

[0106] Libraries as described herein, in some embodiments, comprise varying lengths of a CDRL1, CDRL2, CDRL3, CDRH1, CDRH2, or CDRH3. In some instances, the length of the CDRL1, CDRL2, CDRL3, CDRH1, CDRH2, or CDRH3 comprises at least or about 5, 6, 7, 8, 9, 10, 11, 12, 13, 14, 15, 16, 17, 18, 19, 20, 21, 22, 23, 24, 25, 26, 27, 28, 29, 30, 40, 50, 60, 70, 80, 90, or more than 90 amino acids in length. For example, the CDRH3 comprises at least or about 12, 15, 16, 17, 20, 21, or 23 amino acids in length. In some instances, the CDRL1, CDRL2, CDRL3, CDRH1, CDRH2, or CDRH3 comprises a range of about 1 to about 10, about 5 to about 15, about 10 to about 20, or about 15 to about 30 amino acids in length.

[0107] Libraries comprising nucleic acids encoding for antibodies having variant CDR sequences as described herein comprise various lengths of amino acids when translated. In some instances, the length of each of the amino acid fragments or average length of the amino acid synthesized may be at least or about 15, 20, 25, 30, 35, 40, 45, 50, 55, 60, 65, 70, 75, 80, 85, 90, 95, 100, 105, 110, 115, 120, 125, 130, 135, 140, 145, 150, or more than 150 amino acids. In some instances, the length of the amino acid is about 15 to 150, 20 to 145, 25 to 140, 30 to 135, 35 to 130, 40 to 125, 45 to 120, 50 to 115, 55 to 110, 60 to 110, 65 to 105, 70 to 100, or 75 to 95 amino acids. In some instances, the length of the amino acid is about 22 amino acids to about 75 amino acids. In some instances, the antibodies comprise at least or about 100, 200, 300, 400, 500, 600, 700, 800, 900, 1000, 2000, 3000, 4000, 5000, or more than 5000 amino acids.

[0108] Ratios of the lengths of a CDRL1, CDRL2, CDRL3, CDRH1, CDRH2, or CDRH3 may vary in libraries described herein. In some instances, a CDRL1, CDRL2, CDRL3, CDRH1, CDRH2, or CDRH3 comprising at least or about 5, 6, 7, 8, 9, 10, 11, 12, 13, 14, 15, 16, 17, 18, 19, 20, 21, 22, 23, 24, 25, 26, 27, 28, 29, 30, 40, 50, 60, 70, 80, 90, or more than 90 amino acids in length comprises about 10%, 20%, 30%, 40%, 50%, 60%, 70%, 80%, 90%, or more than 90% of the library. For example, a CDRH3 comprising about 23 amino acids in length is present in the library at 40%, a CDRH3 comprising about 21 amino acids in length is present in the library at 30%, a CDRH3 comprising about 17 amino acids in length is present in the library at 20%, and a CDRH3 comprising about 12 amino acids in length is present in the library at 10%. In some instances, a CDRH3 comprising about 20 amino acids in length is present in the library at 40%, a CDRH3 comprising about 16 amino acids in length is present in the library at 30%, a CDRH3 comprising about 15 amino acids in length is present in the library at 20%, and a CDRH3 comprising about 12 amino acids in length is present in the library at 10%.

[0109] Libraries as described herein encoding for a VHH antibody comprise variant CDR sequences that are shuffled to generate a library with a theoretical diversity of at least or about 10⁷, 10⁸, 10⁹, 10¹⁰, 10¹¹, 10¹², 10¹³, 10¹⁴, 10¹⁵, 10¹⁶, 10¹⁷, 10¹⁸, 10¹⁹, 10²⁰, or more than 10²⁰ sequences. In some instances, the library has a final library diversity of at least or about 10⁷, 10⁸, 10⁹, 10¹⁰, 10¹¹, 10¹², 10¹³, 10¹⁴, 10¹⁵, 10¹⁶, 10¹⁷, 10¹⁸, 10¹⁹, 10²⁰, or more than 10²⁰ sequences.

[0110] Provided herein are GLP1R binding libraries encoding for an immunoglobulin. In some instances, the GLP1R immunoglobulin is an antibody. In some instances, the GLP1R immunoglobulin is a VHH antibody. In some instances, the GLP1R immunoglobulin comprises a binding affinity (e.g., kD) to GLP1R of less than 1 nM, less than 1.2 nM, less than 2 nM, less than 5 nM, less than 10 nM, less than 11 nm, less than 13.5 nM, less than 15 nM, less than 20 nM, less than 25 nM, or less than 30 nM. In some instances, the GLP1R immunoglobulin comprises a kD of less than 1 nM. In some instances, the GLP1R immunoglobulin comprises a kD of less than 1.2 nM. In some instances, the GLP1R immunoglobulin comprises a kD of less than 2 nM. In some instances, the GLP1R immunoglobulin comprises a kD of less than 5 nM. In some instances, the GLP1R immunoglobulin comprises a kD of less than 10 nM. In some instances, the GLP1R immunoglobulin comprises a kD of less than 13.5 nM. In some instances, the GLP1R immunoglobulin comprises a kD of less than 15 nM. In some instances, the GLP1R immunoglobulin comprises a kD of less than 20 nM. In some instances, the GLP1R immunoglobulin comprises a kD of less than 25 nM. In some instances, the GLP1R immunoglobulin comprises a kD of less than 30 nM.

[0111] In some instances, the GLP1R immunoglobulin is a GLP1R agonist. In some instances, the GLP1R immunoglobulin is a GLP1R antagonist. In some instances, the GLP1R immunoglobulin is a GLP1R allosteric modulator. In some instances, the allosteric modulator is a negative allosteric modulator. In some instances, the allosteric modulator is a positive allosteric modulator. In some instances, the GLP1R immunoglobulin results in agonistic, antagonistic, or allosteric effects at a concentration of at least or about 1 nM, 2 nM, 4 nM, 6 nM, 8 nM, 10 nM, 20 nM, 30 nM, 40 nM, 50 nM, 60 nM, 70 nM, 80 nM, 90 nM, 100 nM, 120 nM, 140 nM, 160 nM, 180 nM, 200 nM, 300 nM, 400 nM, 500 nM, 600 nM, 700 nM, 800 nM, 900 nM, 1000 nM, or more than 1000 nM. In some instances, the GLP1R immunoglobulin is a negative allosteric modulator. In some instances, the GLP1R immunoglobulin is a negative allosteric modulator at a concentration of at least or about 0.001, 0.005, 0.01, 0.05, 0.1, 0.5, 1 nM, 2 nM, 4 nM, 6 nM, 8 nM, 10 nM, 20 nM, 30 nM, 40 nM, 50 nM, 60 nM, 70 nM, 80 nM, 90 nM, 100 nM, or more than 100 nM. In some instances, the GLP1R immunoglobulin is a negative allosteric modulator at a concentration in a range of about 0.001 to about 100, 0.01 to about 90, about 0.1 to about 80, 1 to about 50, about 10 to about 40 nM, or about 1 to about 10 nM. In some instances, the GLP1R immunoglobulin comprises an EC50 or IC50 of at least or about 0.001, 0.0025, 0.005, 0.01, 0.025, 0.05, 0.06, 0.07, 0.08, 0.9, 0.1, 0.5, 1, 2, 3, 4, 5, 6, or more than 6 nM. In some instances, the GLP1R immunoglobulin comprises an EC50 or IC50 of at least or about 1 nM, 2 nM, 4 nM, 6 nM, 8 nM, 10 nM, 20 nM, 30 nM, 40 nM, 50 nM, 60 nM, 70 nM, 80 nM, 90 nM, 100 nM, or more than 100 nM.

[0112] Provided herein are GLP1R binding libraries encoding for an immunoglobulin, wherein the immunoglobulin comprises a long half-life. In some instances, the half-life of the GLP1R immunoglobulin is at least or about 12 hours, 24 hours 36 hours, 48 hours, 60 hours, 72 hours, 84 hours, 96 hours, 108 hours, 120 hours, 140 hours, 160 hours, 180 hours, 200 hours, or more than 200 hours. In some instances, the half-life of the GLP1R immunoglobulin is in a range of about 12 hours to about 300 hours, about 20 hours to about 280 hours, about 40 hours to about 240 hours, or about 60 hours to about 200 hours.

[0113] GLP1R immunoglobulins as described herein may comprise improved properties. In some instances, the GLP1R immunoglobulins are monomeric. In some instances, the GLP1R immunoglobulins are not prone to aggregation. In some instances, at least or about 70%, 75%, 80%, 85%, 90%, 95%, or 99% of the GLP1R immunoglobulins are monomeric. In some instances, the GLP1R immunoglobulins are thermostable. In some instances, the GLP1R immunoglobulins result in reduced non-specific binding.

[0114] Following synthesis of GLP1R binding libraries comprising nucleic acids encoding immunoglobulins comprising GLP1R binding domains, libraries may be used for screening and analysis. For example, libraries are assayed for library displayability and panning. In some instances, displayability is assayed using a selectable tag. Exemplary tags include, but are not limited to, a radioactive label, a fluorescent label, an enzyme, a chemiluminescent tag, a colorimetric tag, an affinity tag or other labels or tags that are known in the art. In some instances, the tag is histidine, polyhistidine, myc, hemagglutinin (HA), or FLAG. In some instances, the GLP1R binding libraries comprises nucleic acids encoding immunoglobulins comprising GPCR binding domains with multiple tags such as GFP, FLAG, and Lucy as well as a DNA barcode. In some instances, libraries are assayed by sequencing using various methods including, but not limited to, single-molecule real-time (SMRT) sequencing, Polony sequencing, sequencing by ligation, reversible terminator sequencing, proton detection sequencing, ion semiconductor sequencing, nanopore sequencing, electronic sequencing, pyrosequencing, Maxam-Gilbert sequencing, chain termination (e.g., Sanger) sequencing, +S sequencing, or sequencing by synthesis.

### Expression Systems

[0115] Provided herein are libraries comprising nucleic acids encoding for immunoglobulins comprising GLP1R binding domains, wherein the libraries have improved specificity, stability, expression, folding, or downstream activity. In some instances, libraries described herein are used for screening and analysis.

[0116] Provided herein are libraries comprising nucleic acids encoding for immunoglobulins comprising GLP1R binding domains, wherein the nucleic acid libraries are used for screening and analysis. In some instances, screening and analysis comprise in vitro, in vivo, or ex vivo assays. Cells for screening include primary cells taken from living subjects or cell lines. Cells may be from prokaryotes (e.g., bacteria and fungi) or eukaryotes (e.g., animals and plants). Exemplary animal cells include, without limitation, those from a mouse, rabbit, primate, and insect. In some instances, cells for screening include a cell line including, but not limited to, Chinese Hamster Ovary (CHO) cell line, human embryonic kidney (HEK) cell line, or baby hamster kidney (BHK) cell line. In some instances, nucleic acid libraries described herein may also be delivered to a multicellular organism. Exemplary multicellular organisms include, without limitation, a plant, a mouse, rabbit, primate, and insect.

[0117] Nucleic acid libraries or protein libraries encoded thereof described herein may be screened for various pharmacological or pharmacokinetic properties. In some instances, the libraries are screened using in vitro assays, in vivo assays, or ex vivo assays. For example, in vitro pharmacological or pharmacokinetic properties that are screened include, but are not limited to, binding affinity, binding specificity, and binding avidity. Exemplary in vivo pharmacological or pharmacokinetic properties of libraries described herein that are screened include, but are not limited to, therapeutic efficacy, activity, preclinical toxicity properties, clinical efficacy properties, clinical toxicity properties, immunogenicity, potency, and clinical safety properties.

[0118] Pharmacological or pharmacokinetic properties that may be screened include, but are not limited to, cell binding affinity and cell activity. For example, cell binding affinity assays or cell activity assays are performed to determine agonistic, antagonistic, or allosteric effects of libraries described herein. In some instances, the cell activity assay is a cAMP assay. In some instances, libraries as described herein are compared to cell binding or cell activity of ligands of GLP1R.

[0119] Libraries as described herein may be screened in cell-based assays or in non-cell-based assays. Examples of non-cell-based assays include, but are not limited to, using viral particles, using in vitro translation proteins, and using protealiposomes with GLP1R.

[0120] Nucleic acid libraries as described herein may be screened by sequencing. In some instances, next generation sequence is used to determine sequence enrichment of GLP1R binding variants. In some instances, V gene distribution, J gene distribution, V gene family, CDR3 counts per length, or a combination thereof is determined. In some instances, clonal frequency, clonal accumulation, lineage accumulation, or a combination thereof is determined. In some instances, number of sequences, sequences with VH clones, clones, clones greater than 1, clonotypes, clonotypes greater than 1, lineages, simpsons, or a combination thereof is determined. In some instances, a percentage of non-identical CDR3s is determined. For example, the percentage of non-identical CDR3s is calculated as the number of non-identical CDR3s in a sample divided by the total number of sequences that had a CDR3 in the sample.

[0121] Provided herein are nucleic acid libraries, wherein the nucleic acid libraries may be expressed in a vector. Expression vectors for inserting nucleic acid libraries disclosed herein may comprise eukaryotic or prokaryotic expression vectors. Exemplary expression vectors include, without limitation, mammalian expression vectors: pSF-CMV-NEO-NH2-PPT-3×FLAG, pSF-CMV-NEO-COOH-3×FLAG, pSF-CMV-PURO-NH2-GST-TEV, pSF-OXB20-COOH-TEV-FLAG(R)-6His, pCEP4 pDEST27, pSF-CMV-Ub-KrYFP, pSF-CMV-FMDV-daGFP, pEF1a-mCherry-N1 Vector, pEFla-tdTomato Vector, pSF-CMV-FMDV-Hygro, pSF-CMV-PGK-Puro, pMCP-tag(m), and pSF-CMV—PURO-NH2-CMYC; bacterial expression vectors: pSF-OXB20-BetaGa1, pSF-OXB20-Fluc, pSF-OXB20, and pSF-Tac; plant expression vectors: pRI 101-AN DNA and pCambia2301; and yeast expression vectors: pTYB21 and pKLAC2, and insect vectors: pAc5.1/V5-His A and pDEST8. In some instances, the vector is pcDNA3 or pcDNA3.1.

[0122] Described herein are nucleic acid libraries that are expressed in a vector to generate a construct comprising an immunoglobulin comprising sequences of GLP1R binding domains. In some instances, a size of the construct varies. In some instances, the construct comprises at least or about 500, 600, 700, 800, 900, 1000, 1100, 1300, 1400, 1500, 1600, 1700, 1800, 2000, 2400, 2600, 2800, 3000, 3200, 3400, 3600, 3800, 4000, 4200, 4400, 4600, 4800, 5000, 6000, 7000, 8000, 9000, 10000, or more than 10000 bases. In some instances, a the construct comprises a range of about 300 to 1,000, 300 to 2,000, 300 to 3,000, 300 to 4,000, 300 to 5,000, 300 to 6,000, 300 to 7,000, 300 to 8,000, 300 to 9,000, 300 to 10,000, 1,000 to 2,000, 1,000 to 3,000, 1,000 to 4,000, 1,000 to 5,000, 1,000 to 6,000, 1,000 to 7,000, 1,000 to 8,000, 1,000 to 9,000, 1,000 to 10,000, 2,000 to 3,000, 2,000 to 4,000, 2,000 to 5,000, 2,000 to 6,000, 2,000 to 7,000, 2,000 to 8,000, 2,000 to 9,000, 2,000 to 10,000, 3,000 to 4,000, 3,000 to 5,000, 3,000 to 6,000, 3,000 to 7,000, 3,000 to 8,000, 3,000 to 9,000, 3,000 to 10,000, 4,000 to 5,000, 4,000 to 6,000, 4,000 to 7,000, 4,000 to 8,000, 4,000 to 9,000, 4,000 to 10,000, 5,000 to 6,000, 5,000 to 7,000, 5,000 to 8,000, 5,000 to 9,000, 5,000 to 10,000, 6,000 to 7,000, 6,000 to 8,000, 6,000 to 9,000, 6,000 to 10,000, 7,000 to 8,000, 7,000 to 9,000, 7,000 to 10,000, 8,000 to 9,000, 8,000 to 10,000, or 9,000 to 10,000 bases.

[0123] Provided herein are libraries comprising nucleic acids encoding for immunoglobulins comprising GPCR binding domains, wherein the nucleic acid libraries are expressed in a cell. In some instances, the libraries are synthesized to express a reporter gene. Exemplary reporter genes include, but are not limited to, acetohydroxyacid synthase (AHAS), alkaline phosphatase (AP), beta galactosidase (LacZ), beta glucoronidase (GUS), chloramphenicol acetyltransferase (CAT), green fluorescent protein (GFP), red fluorescent protein (RFP), yellow fluorescent protein (YFP), cyan fluorescent protein (CFP), cerulean fluorescent protein, citrine fluorescent protein, orange fluorescent protein, cherry fluorescent protein, turquoise fluorescent protein, blue fluorescent protein, horseradish peroxidase (HRP), luciferase (Luc), nopaline synthase (NOS), octopine synthase (OCS), luciferase, and derivatives thereof. Methods to determine modulation of a reporter gene are well known in the art, and include, but are not limited to, fluorometric methods (e.g. fluorescence spectroscopy, Fluorescence Activated Cell Sorting (FACS), fluorescence microscopy), and antibiotic resistance determination.

### Diseases and Disorders

[0124] Provided herein are GLP1R binding libraries comprising nucleic acids encoding for immunoglobulins (e.g., antibodies) comprising GLP1R binding domains that may have therapeutic effects. In some instances, the GLP1R binding libraries result in protein when translated that is used to treat a disease or disorder. In some instances, the protein is an immunoglobulin. In some instances, the protein is a peptidomimetic.

[0125] GLP1R libraries as described herein may comprise modulators of GLP1R. In some instances, the modulator of GLP1R is an inhibitor. In some instances, the modulator of GLP1R is an activator. In some instances, the GLP1R inhibitor is a GLP1R antagonist. In some instances, the GLP1R antagonist is GLP1R-3. Modulators of GLP1R, in some instances, are used for treating various diseases or disorders.

[0126] Exemplary diseases include, but are not limited to, cancer, inflammatory diseases or disorders, a metabolic disease or disorder, a cardiovascular disease or disorder, a respiratory disease or disorder, pain, a digestive disease or disorder, a reproductive disease or disorder, an endocrine disease or disorder, or a neurological disease or disorder. In some instances, the cancer is a solid cancer or a hematologic cancer. In some instances, a modulator of GLP1R as described herein is used for treatment of weight gain (or for inducing weight loss), treatment of obesity, or treatment of Type II diabetes. In some instances, the GLP1R modulator is used for treating hypoglycemia. In some instances, the GLP1R modulator is used for treating post-bariatric hypoglycemia. In some instances, the GLP1R modulator is used for treating severe hypoglycemia. In some instances, the GLP1R modulator is used for treating hyperinsulinism. In some instances, the GLP1R modulator is used for treating congenital hyperinsulinism.

[0127] In some instances, the subject is a mammal. In some instances, the subject is a mouse, rabbit, dog, or human. Subjects treated by methods described herein may be infants, adults, or children. Pharmaceutical compositions comprising antibodies or antibody fragments as described herein may be administered intravenously or subcutaneously.

[0128] Described herein are pharmaceutical compositions comprising antibodies or antibody fragment thereof that binds GLP1R. In some embodiments, the antibody or antibody fragment thereof comprises a sequence as set forth in Tables 7-13. In some embodiments, the antibody or antibody fragment thereof comprises a sequence that is at least or about 70%, 80%, 85%, 90%, 91%, 92%, 93%, 94%, 95%, 96%, 97%, 98%, 99%, or 100% sequence identity to a sequence as set forth in Tables 7-13.

[0129] In some instances, a pharmaceutical composition comprises an antibody or antibody fragment described herein comprising a CDRH1 sequence of any one of SEQ ID NOs: 441-619. In some instances, a pharmaceutical composition comprises an antibody or antibody fragment described herein comprising a sequence that is at least 80% identical to a CDRH1 sequence of any one of SEQ ID NOs: 441-619. In some instances, a pharmaceutical composition comprises an antibody or antibody fragment described herein comprising a sequence that is at least 85% identical to a CDRH1 sequence of any one of SEQ ID NOs: 441-619. In some instances, a pharmaceutical composition comprises an antibody or antibody fragment described herein comprising a sequence that is at least 90% identical to a CDRH1 sequence of any one of SEQ ID NOs: 441-619. In some instances, a pharmaceutical composition comprises an antibody or antibody fragment described herein comprising a sequence that is at least 95% identical to a CDRH1 sequence of any one of SEQ ID NOs: 441-619. In some instances, a pharmaceutical composition comprises an antibody or antibody fragment described herein comprising a CDRH2 sequence of any one of SEQ ID NOs: 620-798. In some instances, a pharmaceutical composition comprises an antibody or antibody fragment described herein comprising a sequence that is at least 80% identical to a CDRH2 sequence of any one of SEQ ID NOs: 620-798. In some instances, a pharmaceutical composition comprises an antibody or antibody fragment described herein comprising a sequence that is at least 85% identical to a CDRH2 sequence of any one of SEQ ID NOs: 620-798. In some instances, a pharmaceutical composition comprises an antibody or antibody fragment described herein comprising a sequence that is at least 90% identical to a CDRH2 sequence of any one of SEQ ID NOs: 620-798. In some instances, a pharmaceutical composition comprises an antibody or antibody fragment described herein comprising a sequence that is at least 95% identical to a CDRH2 sequence of any one of SEQ ID NOs: 620-798. In some instances, a pharmaceutical composition comprises an antibody or antibody fragment described herein comprising a CDRH3 sequence of any one of SEQ ID NOs: 799-977. In some instances, a pharmaceutical composition comprises an antibody or antibody fragment described herein comprising a sequence that is at least 80% identical to a CDRH3 sequence of any one of SEQ ID NOs: 799-977. In some instances, a pharmaceutical composition comprises an antibody or antibody fragment described herein comprising a sequence that is at least 85% identical to a CDRH3 sequence of any one of SEQ ID NOs: 799-977. In some instances, a pharmaceutical composition comprises an antibody or antibody fragment described herein comprising a sequence that is at least 90% identical to a CDRH3 sequence of any one of SEQ ID NOs: 799-977. In some instances, a pharmaceutical composition comprises an antibody or antibody fragment described herein comprising a sequence that is at least 95% identical to a CDRH3 sequence of any one of SEQ ID NOs: 799-977.

[0130] In some instances, a pharmaceutical composition comprises an antibody or antibody fragment described herein comprising a CDRL1 sequence of any one of SEQ ID NOs: 978-1156. In some instances, a pharmaceutical composition comprises an antibody or antibody fragment described herein comprising a sequence that is at least 80% identical to a CDRL1 sequence of any one of SEQ ID NOs: 978-1156. In some instances, a pharmaceutical composition comprises an antibody or antibody fragment described herein comprising a sequence that is at least 85% identical to a CDRL1 sequence of any one of SEQ ID NOs: 978-1156. In some instances, a pharmaceutical composition comprises an antibody or antibody fragment described herein comprising a sequence that is at least 90% identical to a CDRL1 sequence of any one of SEQ ID NOs: 978-1156. In some instances, a pharmaceutical composition comprises an antibody or antibody fragment described herein comprising a sequence that is at least 95% identical to a CDRL1 sequence of any one of SEQ ID NOs: 978-1156. In some instances, a pharmaceutical composition comprises an antibody or antibody fragment described herein comprising a CDRL2 sequence of any one of SEQ ID NOs: 1157-1168. In some instances, a pharmaceutical composition comprises an antibody or antibody fragment described herein comprising a sequence that is at least 80% identical to a CDRL2 sequence of any one of SEQ ID NOs: 1157-1335. In some instances, a pharmaceutical composition comprises an antibody or antibody fragment described herein comprising a sequence that is at least 85% identical to a CDRL2 sequence of any one of SEQ ID NOs: 1157-1335. In some instances, a pharmaceutical composition comprises an antibody or antibody fragment described herein comprising a sequence that is at least 90% identical to a CDRL2 sequence of any one of SEQ ID NOs: 1157-1335. In some instances, a pharmaceutical composition comprises an antibody or antibody fragment described herein comprising a sequence that is at least 95% identical to a CDRL2 sequence of any one of SEQ ID NOs: 1157-1335. In some instances, a pharmaceutical composition comprises an antibody or antibody fragment described herein comprising a CDRL3 sequence of any one of SEQ ID NOs: 1336-1347 and 1353-1519. In some instances, a pharmaceutical composition comprises an antibody or antibody fragment described herein comprising a sequence that is at least 80% identical to a CDRL3 sequence of any one of SEQ ID NOs: 1336-1347 and 1353-1519. In some instances, a pharmaceutical composition comprises an antibody or antibody fragment described herein comprising a sequence that is at least 85% identical to a CDRL3 sequence of any one of SEQ ID NOs: 1336-1347 and 1353-1519. In some instances, a pharmaceutical composition comprises an antibody or antibody fragment described herein comprising a sequence that is at least 90% identical to a CDRL3 sequence of any one of SEQ ID NOs: 1336-1347 and 1353-1519. In some instances, a pharmaceutical composition comprises an antibody or antibody fragment described herein comprising a sequence that is at least 95% identical to a CDRL3 sequence of any one of SEQ ID NOs: 1336-1347 and 1353-1519.

[0131] In some embodiments, the antibody or antibody fragment comprising a variable domain, heavy chain region (VH) and a variable domain, light chain region (VL), wherein VH comprises complementarity determining regions CDRH1, CDRH2, and CDRH3, wherein VL comprises complementarity determining regions CDRL1, CDRL2, and CDRL3, and wherein (a) an amino acid sequence of CDRH1 is as set forth in any one of SEQ ID NOs: 441-619; (b) an amino acid sequence of CDRH2 is as set forth in any one of SEQ ID NOs: 620-798; (c) an amino acid sequence of CDRH3 is as set forth in any one of SEQ ID NOs: 799-977; (d) an amino acid sequence of CDRL1 is as set forth in any one of SEQ ID NOs: 978-1156; (e) an amino acid sequence of CDRL2 is as set forth in any one of SEQ ID NOs: 1157-1335; and (f) an amino acid sequence of CDRL3 is as set forth in any one of SEQ ID NOs: 1336-1347 and 1353-1519. In some embodiments, the antibody or antibody fragment comprising a variable domain, heavy chain region (VH) and a variable domain, light chain region (VL), wherein VH comprises complementarity determining regions CDRH1, CDRH2, and CDRH3, wherein VL comprises complementarity determining regions CDRL1, CDRL2, and CDRL3, and wherein (a) an amino acid sequence of CDRH1 is at least or about 80%, 85%, 90%, or 95% identical to any one of SEQ ID NOs: 441-619; (b) an amino acid sequence of CDRH2 is at least or about 80%, 85%, 90%, or 95% identical to any one of SEQ ID NOs: 620-798; (c) an amino acid sequence of CDRH3 is at least or about 80%, 85%, 90%, or 95% identical to any one of SEQ ID NOs: 799-977; (d) an amino acid sequence of CDRL1 is at least or about 80%, 85%, 90%, or 95% identical to any one of SEQ ID NOs: 978-1156; (e) an amino acid sequence of CDRL2 is at least or about 80%, 85%, 90%, or 95% identical to any one of SEQ ID NOs: 1157-1335; and (f) an amino acid sequence of CDRL3 is at least or about 80%, 85%, 90%, or 95% identical to any one of SEQ ID NOs: 1336-1347 and 1353-1519. Described herein, in some embodiments, are antibodies or antibody fragments comprising a variable domain, heavy chain region (VH) and a variable domain, light chain region (VL), wherein the VH comprises an amino acid sequence at least about 90% identical to a sequence as set forth in any one of SEQ ID NOs: 58-77, and wherein the VL comprises an amino acid sequence at least about 90% identical to a sequence as set forth in any one of SEQ ID NOs: 92-111. In some instances, the antibodies or antibody fragments comprise VH comprising at least or about 70%, 80%, 85%, 90%, 91%, 92%, 93%, 94%, 95%, 96%, 97%, 98%, 99%, or 100% sequence identity to any one of SEQ ID NOs: 58-77, and VL comprising at least or about 70%, 80%, 85%, 90%, 91%, 92%, 93%, 94%, 95%, 96%, 97%, 98%, 99%, or 100% sequence identity to any one of SEQ ID NOs: 92-111.

[0132] Described herein are pharmaceutical compositions comprising antibodies or antibody fragment thereof that binds GLP1R that comprise various dosages of the antibodies or antibody fragment. In some instances, the dosage is ranging from about 1 to 80 mg/kg, from about 1 to about 100 mg/kg, from about 5 to about 100 mg/kg, from about 5 to about 80 mg/kg, from about 5 to about 60 mg/kg, from about 5 to about 50 mg/kg or from about 5 to about 500 mg/kg which can be administered in single or multiple doses. In some instances, the dosage is administered in an amount of about 0.01 mg/kg, about 0.05 mg/kg, about 0.10 mg/kg, about 0.25 mg/kg, about 0.5 mg/kg, about 1 mg/kg, about 5 mg/kg, about 10 mg/kg, about 15 mg/kg, about 20 mg/kg, about 25 mg/kg, about 30 mg/kg, about 35 mg/kg, about 40 mg/kg, about 45 mg/kg, about 50 mg/kg, about 55 mg/kg, about 60 mg/kg, about 65 mg/kg, about 70 mg/kg, about 75 mg/kg, about 80 mg/kg, about 85 mg/kg, about 90 mg/kg, about 95 mg/kg, about 100 mg/kg, about 105 mg/kg, about 110 mg/kg, about 115 mg/kg, about 120, about 125, about 130, about 135, about 140, about 145, about 150, about 155, about 160, about 165, about 170, about 175, about 180, about 185, about 190, about 195, about 200, about 205, about 210, about 215, about 220, about 225, about 230, about 240, about 250, about 260, about 270, about 275, about 280, about 290, about 300, about 310, about 320, about 330, about 340, about 350, about 360 mg/kg, about 370 mg/kg, about 380 mg/kg, about 390 mg/kg, about 400 mg/kg, 410 mg/kg, about 420 mg/kg, about 430 mg/kg, about 440 mg/kg, about 450 mg/kg, about 460 mg/kg, about 470 mg/kg, about 480 mg/kg, about 490 mg/kg, or about 500 mg/kg.

### Variant Libraries

### Codon Variation

[0133] Variant nucleic acid libraries described herein may comprise a plurality of nucleic acids, wherein each nucleic acid encodes for a variant codon sequence compared to a reference nucleic acid sequence. In some instances, each nucleic acid of a first nucleic acid population contains a variant at a single variant site. In some instances, the first nucleic acid population contains a plurality of variants at a single variant site such that the first nucleic acid population contains more than one variant at the same variant site. The first nucleic acid population may comprise nucleic acids collectively encoding multiple codon variants at the same variant site. The first nucleic acid population may comprise nucleic acids collectively encoding up to 19 or more codons at the same position. The first nucleic acid population may comprise nucleic acids collectively encoding up to 60 variant triplets at the same position, or the first nucleic acid population may comprise nucleic acids collectively encoding up to 61 different triplets of codons at the same position. Each variant may encode for a codon that results in a different amino acid during translation. Table 2 provides a listing of each codon possible (and the representative amino acid) for a variant site.

TABLE 2
List of codons and amino acids

| | One | Three | | | | | | |
|---|---|---|---|---|---|---|---|---|
| | letter | letter | | | | | | |
| Amino Acids | code | code | Codons | | | | | |
| Alanine | A | Ala | GCA | GCC | GCG | GCT | | |
| Cysteine | C | Cys | TGC | TGT | | | | |
| Aspartic acid | D | Asp | GAC | GAT | | | | |
| Glutamic acid | E | Glu | GAA | GAG | | | | |
| Phenylalanine | F | Phe | TTC | TTT | | | | |
| Glycine | G | Gly | GGA | GGC | GGG | GGT | | |
| Histidine | H | His | CAC | CAT | | | | |
| Isoleucine | I | Iso | ATA | ATC | ATT | | | |
| Lysine | K | Lys | AAA | AAG | | | | |
| Leucine | L | Leu | TTA | TTG | CTA | CTC | CTG | CTT |
| Methionine | M | Met | ATG | | | | | |
| Asparagine | N | Asn | AAC | AAT | | | | |
| Proline | P | Pro | CCA | CCC | CCG | CCT | | |
| Glutamine | Q | Gln | CAA | CAG | | | | |
| Arginine | R | Arg | AGA | AGG | CGA | CGC | CGG | CGT |
| Serine | S | Ser | AGC | AGT | TCA | TCC | TCG | TCT |

| | | | | | | |
|---|---|---|---|---|---|---|
| Threonine | T | Thr | ACA | ACC | ACG | ACT |
| Valine | V | Val | GTA | GTC | GTG | GTT |

| Tryptophan | W | Trp | TGG | |
|---|---|---|---|---|
| Tyrosine | Y | Tyr | TAC | TAT |

[0134] A nucleic acid population may comprise varied nucleic acids collectively encoding up to 20 codon variations at multiple positions. In such cases, each nucleic acid in the population comprises variation for codons at more than one position in the same nucleic acid. In some instances, each nucleic acid in the population comprises variation for codons at 1, 2, 3, 4, 5, 6, 7, 8, 9, 10, 11, 12, 13, 14, 15, 16, 17, 18, 19, 20 or more codons in a single nucleic acid. In some instances, each variant long nucleic acid comprises variation for codons at 1, 2, 3, 4, 5, 6, 7, 8, 9, 10, 11, 12, 13, 14, 15, 16, 17, 18, 19, 20, 21, 22, 23, 24, 25, 26, 27, 28, 29, 30 or more codons in a single long nucleic acid. In some instances, the variant nucleic acid population comprises variation for codons at 1, 2, 3, 4, 5, 6, 7, 8, 9, 10, 11, 12, 13, 14, 15, 16, 17, 18, 19, 20, 21, 22, 23, 24, 25, 26, 27, 28, 29, 30 or more codons in a single nucleic acid. In some instances, the variant nucleic acid population comprises variation for codons in at least about 10, 20, 30, 40, 50, 60, 70, 80, 90, 100 or more codons in a single long nucleic acid.

### Highly Parallel Nucleic Acid Synthesis

[0135] Provided herein is a platform approach utilizing miniaturization, parallelization, and vertical integration of the end-to-end process from polynucleotide synthesis to gene assembly within nanowells on silicon to create a revolutionary synthesis platform. Devices described herein provide, with the same footprint as a 96-well plate, a silicon synthesis platform capable of increasing throughput by a factor of up to 1,000 or more compared to traditional synthesis methods, with production of up to approximately 1,000,000 or more polynucleotides, or 10,000 or more genes in a single highly-parallelized run.

[0136] With the advent of next-generation sequencing, high resolution genomic data has become an important factor for studies that delve into the biological roles of various genes in both normal biology and disease pathogenesis. At the core of this research is the central dogma of molecular biology and the concept of “residue-by-residue transfer of sequential information.” Genomic information encoded in the DNA is transcribed into a message that is then translated into the protein that is the active product within a given biological pathway.

[0137] Another exciting area of study is on the discovery, development and manufacturing of therapeutic molecules focused on a highly-specific cellular target. High diversity DNA sequence libraries are at the core of development pipelines for targeted therapeutics. Gene mutants are used to express proteins in a design, build, and test protein engineering cycle that ideally culminates in an optimized gene for high expression of a protein with high affinity for its therapeutic target. As an example, consider the binding pocket of a receptor. The ability to test all sequence permutations of all residues within the binding pocket simultaneously will allow for a thorough exploration, increasing chances of success. Saturation mutagenesis, in which a researcher attempts to generate all possible mutations at a specific site within the receptor, represents one approach to this development challenge. Though costly and time- and labor-intensive, it enables each variant to be introduced into each position. In contrast, combinatorial mutagenesis, where a few selected positions or short stretch of DNA may be modified extensively, generates an incomplete repertoire of variants with biased representation.

[0138] To accelerate the drug development pipeline, a library with the desired variants available at the intended frequency in the right position available for testing—in other words, a precision library—enables reduced costs as well as turnaround time for screening. Provided herein are methods for synthesizing nucleic acid synthetic variant libraries which provide for precise introduction of each intended variant at the desired frequency. To the end user, this translates to the ability to not only thoroughly sample sequence space but also be able to query these hypotheses in an efficient manner, reducing cost and screening time. Genome-wide editing can elucidate important pathways, libraries where each variant and sequence permutation can be tested for optimal functionality, and thousands of genes can be used to reconstruct entire pathways and genomes to re-engineer biological systems for drug discovery.

[0139] In a first example, a drug itself can be optimized using methods described herein. For example, to improve a specified function of an antibody, a variant polynucleotide library encoding for a portion of the antibody is designed and synthesized. A variant nucleic acid library for the antibody can then be generated by processes described herein (e.g., PCR mutagenesis followed by insertion into a vector). The antibody is then expressed in a production cell line and screened for enhanced activity. Example screens include examining modulation in binding affinity to an antigen, stability, or effector function (e.g., ADCC, complement, or apoptosis). Exemplary regions to optimize the antibody include, without limitation, the Fc region, Fab region, variable region of the Fab region, constant region of the Fab region, variable domain of the heavy chain or light chain (V_{H} or V_{L}), and specific complementarity-determining regions (CDRs) of V_{H} or V_{L}.

[0140] Nucleic acid libraries synthesized by methods described herein may be expressed in various cells associated with a disease state. Cells associated with a disease state include cell lines, tissue samples, primary cells from a subject, cultured cells expanded from a subject, or cells in a model system. Exemplary model systems include, without limitation, plant and animal models of a disease state.

[0141] To identify a variant molecule associated with prevention, reduction or treatment of a disease state, a variant nucleic acid library described herein is expressed in a cell associated with a disease state, or one in which a cell a disease state can be induced. In some instances, an agent is used to induce a disease state in cells. Exemplary tools for disease state induction include, without limitation, a Cre/Lox recombination system, LPS inflammation induction, and streptozotocin to induce hypoglycemia. The cells associated with a disease state may be cells from a model system or cultured cells, as well as cells from a subject having a particular disease condition. Exemplary disease conditions include a bacterial, fungal, viral, autoimmune, or proliferative disorder (e.g., cancer). In some instances, the variant nucleic acid library is expressed in the model system, cell line, or primary cells derived from a subject, and screened for changes in at least one cellular activity. Exemplary cellular activities include, without limitation, proliferation, cycle progression, cell death, adhesion, migration, reproduction, cell signaling, energy production, oxygen utilization, metabolic activity, and aging, response to free radical damage, or any combination thereof.

### Substrates

[0142] Devices used as a surface for polynucleotide synthesis may be in the form of substrates which include, without limitation, homogenous array surfaces, patterned array surfaces, channels, beads, gels, and the like. Provided herein are substrates comprising a plurality of clusters, wherein each cluster comprises a plurality of loci that support the attachment and synthesis of polynucleotides. In some instances, substrates comprise a homogenous array surface. For example, the homogenous array surface is a homogenous plate. The term “locus” as used herein refers to a discrete region on a structure which provides support for polynucleotides encoding for a single predetermined sequence to extend from the surface. In some instances, a locus is on a two-dimensional surface, e.g., a substantially planar surface. In some instances, a locus is on a three-dimensional surface, e.g., a well, microwell, channel, or post. In some instances, a surface of a locus comprises a material that is actively functionalized to attach to at least one nucleotide for polynucleotide synthesis, or preferably, a population of identical nucleotides for synthesis of a population of polynucleotides. In some instances, polynucleotide refers to a population of polynucleotides encoding for the same nucleic acid sequence. In some cases, a surface of a substrate is inclusive of one or a plurality of surfaces of a substrate. The average error rates for polynucleotides synthesized within a library described here using the systems and methods provided are often less than 1 in 1000, less than about 1 in 2000, less than about 1 in 3000 or less often without error correction.

[0143] Provided herein are surfaces that support the parallel synthesis of a plurality of polynucleotides having different predetermined sequences at addressable locations on a common support. In some instances, a substrate provides support for the synthesis of more than 50, 100, 200, 400, 600, 800, 1000, 1200, 1400, 1600, 1800, 2,000; 5,000; 10,000; 20,000; 50,000; 100,000; 200,000; 300,000; 400,000; 500,000; 600,000; 700,000; 800,000; 900,000; 1,000,000; 1,200,000; 1,400,000; 1,600,000; 1,800,000; 2,000,000; 2,500,000; 3,000,000; 3,500,000; 4,000,000; 4,500,000; 5,000,000; 10,000,000 or more non-identical polynucleotides. In some cases, the surfaces provide support for the synthesis of more than 50, 100, 200, 400, 600, 800, 1000, 1200, 1400, 1600, 1800, 2,000; 5,000; 10,000; 20,000; 50,000; 100,000; 200,000; 300,000; 400,000; 500,000; 600,000; 700,000; 800,000; 900,000; 1,000,000; 1,200,000; 1,400,000; 1,600,000; 1,800,000; 2,000,000; 2,500,000; 3,000,000; 3,500,000; 4,000,000; 4,500,000; 5,000,000; 10,000,000 or more polynucleotides encoding for distinct sequences. In some instances, at least a portion of the polynucleotides have an identical sequence or are configured to be synthesized with an identical sequence. In some instances, the substrate provides a surface environment for the growth of polynucleotides having at least 80, 90, 100, 120, 150, 175, 200, 225, 250, 275, 300, 325, 350, 375, 400, 425, 450, 475, 500 bases or more.

[0144] Provided herein are methods for polynucleotide synthesis on distinct loci of a substrate, wherein each locus supports the synthesis of a population of polynucleotides. In some cases, each locus supports the synthesis of a population of polynucleotides having a different sequence than a population of polynucleotides grown on another locus. In some instances, each polynucleotide sequence is synthesized with 1, 2, 3, 4, 5, 6, 7, 8, 9 or more redundancy across different loci within the same cluster of loci on a surface for polynucleotide synthesis. In some instances, the loci of a substrate are located within a plurality of clusters. In some instances, a substrate comprises at least 10, 500, 1000, 2000, 3000, 4000, 5000, 6000, 7000, 8000, 9000, 10000, 11000, 12000, 13000, 14000, 15000, 20000, 30000, 40000, 50000 or more clusters. In some instances, a substrate comprises more than 2,000; 5,000; 10,000; 100,000; 200,000; 300,000; 400,000; 500,000; 600,000; 700,000; 800,000; 900,000; 1,000,000; 1,100,000; 1,200,000; 1,300,000; 1,400,000; 1,500,000; 1,600,000; 1,700,000; 1,800,000; 1,900,000; 2,000,000; 300,000; 400,000; 500,000; 600,000; 700,000; 800,000; 900,000; 1,000,000; 1,200,000; 1,400,000; 1,600,000; 1,800,000; 2,000,000; 2,500,000; 3,000,000; 3,500,000; 4,000,000; 4,500,000; 5,000,000; or 10,000,000 or more distinct loci. In some instances, a substrate comprises about 10,000 distinct loci. The amount of loci within a single cluster is varied in different instances. In some cases, each cluster includes 1, 2, 3, 4, 5, 6, 7, 8, 9, 10, 20, 30, 40, 50, 60, 70, 80, 90, 100, 120, 130, 150, 200, 300, 400, 500 or more loci. In some instances, each cluster includes about 50-500 loci. In some instances, each cluster includes about 100-200 loci. In some instances, each cluster includes about 100-150 loci. In some instances, each cluster includes about 109, 121, 130 or 137 loci. In some instances, each cluster includes about 19, 20, 61, 64 or more loci. Alternatively or in combination, polynucleotide synthesis occurs on a homogenous array surface.

[0145] In some instances, the number of distinct polynucleotides synthesized on a substrate is dependent on the number of distinct loci available in the substrate. In some instances, the density of loci within a cluster or surface of a substrate is at least or about 1, 10, 25, 50, 65, 75, 100, 130, 150, 175, 200, 300, 400, 500, 1,000 or more loci per mm². In some cases, a substrate comprises 10-500, 25-400, 50-500, 100-500, 150-500, 10-250, 50-250, 10-200, or 50-200 mm². In some instances, the distance between the centers of two adjacent loci within a cluster or surface is from about 10-500, from about 10-200, or from about 10-100 um. In some instances, the distance between two centers of adjacent loci is greater than about 10, 20, 30, 40, 50, 60, 70, 80, 90 or 100 um. In some instances, the distance between the centers of two adjacent loci is less than about 200, 150, 100, 80, 70, 60, 50, 40, 30, 20 or 10 um. In some instances, each locus has a width of about 0.5, 1, 2, 3, 4, 5, 6, 7, 8, 9, 10, 20, 30, 40, 50, 60, 70, 80, 90 or 100 um. In some cases, each locus has a width of about 0.5-100, 0.5-50, 10-75, or 0.5-50 um.

[0146] In some instances, the density of clusters within a substrate is at least or about 1 cluster per 100 mm², 1 cluster per 10 mm², 1 cluster per 5 mm², 1 cluster per 4 mm², 1 cluster per 3 mm², 1 cluster per 2 mm², 1 cluster per 1 mm², 2 clusters per 1 mm², 3 clusters per 1 mm², 4 clusters per 1 mm², 5 clusters per 1 mm², 10 clusters per 1 mm², 50 clusters per 1 mm² or more. In some instances, a substrate comprises from about 1 cluster per 10 mm² to about 10 clusters per 1 mm². In some instances, the distance between the centers of two adjacent clusters is at least or about 50, 100, 200, 500, 1000, 2000, or 5000 μm. In some cases, the distance between the centers of two adjacent clusters is between about 50-100, 50-200, 50-300, 50-500, and 100-2000 um. In some cases, the distance between the centers of two adjacent clusters is between about 0.05-50, 0.05-10, 0.05-5, 0.05-4, 0.05-3, 0.05-2, 0.1-10, 0.2-10, 0.3-10, 0.4-10, 0.5-10, 0.5-5, or 0.5-2 mm. In some cases, each cluster has a cross section of about 0.5 to about 2, about 0.5 to about 1, or about 1 to about 2 mm. In some cases, each cluster has a cross section of about 0.5, 0.6, 0.7, 0.8, 0.9, 1, 1.1, 1.2, 1.3, 1.4, 1.5, 1.6, 1.7, 1.8, 1.9 or 2 mm. In some cases, each cluster has an interior cross section of about 0.5, 0.6, 0.7, 0.8, 0.9, 1, 1.1, 1.15, 1.2, 1.3, 1.4, 1.5, 1.6, 1.7, 1.8, 1.9 or 2 mm.

[0147] In some instances, a substrate is about the size of a standard 96 well plate, for example between about 100 and about 200 mm by between about 50 and about 150 mm. In some instances, a substrate has a diameter less than or equal to about 1000, 500, 450, 400, 300, 250, 200, 150, 100 or 50 mm. In some instances, the diameter of a substrate is between about 25-1000, 25-800, 25-600, 25-500, 25-400, 25-300, or 25-200 mm. In some instances, a substrate has a planar surface area of at least about 100; 200; 500; 1,000; 2,000; 5,000; 10,000; 12,000; 15,000; 20,000; 30,000; 40,000; 50,000 mm² or more. In some instances, the thickness of a substrate is between about 50-2000, 50-1000, 100-1000, 200-1000, or 250-1000 mm.

### Surface Materials

[0148] Substrates, devices, and reactors provided herein are fabricated from any variety of materials suitable for the methods, compositions, and systems described herein. In certain instances, substrate materials are fabricated to exhibit a low level of nucleotide binding. In some instances, substrate materials are modified to generate distinct surfaces that exhibit a high level of nucleotide binding. In some instances, substrate materials are transparent to visible and/or UV light. In some instances, substrate materials are sufficiently conductive, e.g., are able to form uniform electric fields across all or a portion of a substrate. In some instances, conductive materials are connected to an electric ground. In some instances, the substrate is heat conductive or insulated. In some instances, the materials are chemical resistant and heat resistant to support chemical or biochemical reactions, for example polynucleotide synthesis reaction processes. In some instances, a substrate comprises flexible materials. For flexible materials, materials can include, without limitation: nylon, both modified and unmodified, nitrocellulose, polypropylene, and the like. In some instances, a substrate comprises rigid materials. For rigid materials, materials can include, without limitation: glass; fuse silica; silicon, plastics (for example polytetraflouroethylene, polypropylene, polystyrene, polycarbonate, and blends thereof, and the like); and metals (for example, gold, platinum, and the like). The substrate, solid support or reactors can be fabricated from a material selected from the group consisting of silicon, polystyrene, agarose, dextran, cellulosic polymers, polyacrylamides, polydimethylsiloxane (PDMS), and glass. The substrates/solid supports or the microstructures/reactors therein may be manufactured with a combination of materials listed herein or any other suitable material known in the art.

### Surface Architecture

[0149] Provided herein are substrates for the methods, compositions, and systems described herein, wherein the substrates have a surface architecture suitable for the methods, compositions, and systems described herein. In some instances, a substrate comprises raised and/or lowered features. One benefit of having such features is an increase in surface area to support polynucleotide synthesis. In some instances, a substrate having raised and/or lowered features is referred to as a three-dimensional substrate. In some cases, a three-dimensional substrate comprises one or more channels. In some cases, one or more loci comprise a channel. In some cases, the channels are accessible to reagent deposition via a deposition device such as a material deposition device. In some cases, reagents and/or fluids collect in a larger well in fluid communication one or more channels. For example, a substrate comprises a plurality of channels corresponding to a plurality of loci with a cluster, and the plurality of channels are in fluid communication with one well of the cluster. In some methods, a library of polynucleotides is synthesized in a plurality of loci of a cluster.

[0150] Provided herein are substrates for the methods, compositions, and systems described herein, wherein the substrates are configured for polynucleotide synthesis. In some instances, the structure is configured to allow for controlled flow and mass transfer paths for polynucleotide synthesis on a surface. In some instances, the configuration of a substrate allows for the controlled and even distribution of mass transfer paths, chemical exposure times, and/or wash efficacy during polynucleotide synthesis. In some instances, the configuration of a substrate allows for increased sweep efficiency, for example by providing sufficient volume for a growing polynucleotide such that the excluded volume by the growing polynucleotide does not take up more than 50, 45, 40, 35, 30, 25, 20, 15, 14, 13, 12, 11, 10, 9, 8, 7, 6, 5, 4, 3, 2, 1%, or less of the initially available volume that is available or suitable for growing the polynucleotide. In some instances, a three-dimensional structure allows for managed flow of fluid to allow for the rapid exchange of chemical exposure.

[0151] Provided herein are substrates for the methods, compositions, and systems described herein, wherein the substrates comprise structures suitable for the methods, compositions, and systems described herein. In some instances, segregation is achieved by physical structure. In some instances, segregation is achieved by differential functionalization of the surface generating active and passive regions for polynucleotide synthesis. In some instances, differential functionalization is achieved by alternating the hydrophobicity across the substrate surface, thereby creating water contact angle effects that cause beading or wetting of the deposited reagents. Employing larger structures can decrease splashing and cross-contamination of distinct polynucleotide synthesis locations with reagents of the neighboring spots. In some cases, a device, such as a material deposition device, is used to deposit reagents to distinct polynucleotide synthesis locations. Substrates having three-dimensional features are configured in a manner that allows for the synthesis of a large number of polynucleotides (e.g., more than about 10,000) with a low error rate (e.g., less than about 1:500, 1:1000, 1:1500, 1:2,000, 1:3,000, 1:5,000, or 1:10,000). In some cases, a substrate comprises features with a density of about or greater than about 1, 5, 10, 20, 30, 40, 50, 60, 70, 80, 100, 110, 120, 130, 140, 150, 160, 170, 180, 190, 200, 300, 400 or 500 features per mm².

[0152] A well of a substrate may have the same or different width, height, and/or volume as another well of the substrate. A channel of a substrate may have the same or different width, height, and/or volume as another channel of the substrate. In some instances, the diameter of a cluster or the diameter of a well comprising a cluster, or both, is between about 0.05-50, 0.05-10, 0.05-5, 0.05-4, 0.05-3, 0.05-2, 0.05-1, 0.05-0.5, 0.05-0.1, 0.1-10, 0.2-10, 0.3-10, 0.4-10, 0.5-10, 0.5-5, or 0.5-2 mm. In some instances, the diameter of a cluster or well or both is less than or about 5, 4, 3, 2, 1, 0.5, 0.1, 0.09, 0.08, 0.07, 0.06, or 0.05 mm. In some instances, the diameter of a cluster or well or both is between about 1.0 and 1.3 mm. In some instances, the diameter of a cluster or well, or both is about 1.150 mm. In some instances, the diameter of a cluster or well, or both is about 0.08 mm. The diameter of a cluster refers to clusters within a two-dimensional or three-dimensional substrate.

[0153] In some instances, the height of a well is from about 20-1000, 50-1000, 100-1000, 200-1000, 300-1000, 400-1000, or 500-1000 um. In some cases, the height of a well is less than about 1000, 900, 800, 700, or 600 um.

[0154] In some instances, a substrate comprises a plurality of channels corresponding to a plurality of loci within a cluster, wherein the height or depth of a channel is 5-500, 5-400, 5-300, 5-200, 5-100, 5-50, or 10-50 um. In some cases, the height of a channel is less than 100, 80, 60, 40, or 20 um.

[0155] In some instances, the diameter of a channel, locus (e.g., in a substantially planar substrate) or both channel and locus (e.g., in a three-dimensional substrate wherein a locus corresponds to a channel) is from about 1-1000, 1-500, 1-200, 1-100, 5-100, or 10-100 um, for example, to about 90, 80, 70, 60, 50, 40, 30, 20 or 10 μm. In some instances, the diameter of a channel, locus, or both channel and locus is less than about 100, 90, 80, 70, 60, 50, 40, 30, 20 or 10 μm. In some instances, the distance between the center of two adjacent channels, loci, or channels and loci is from about 1-500, 1-200, 1-100, 5-200, 5-100, 5-50, or 5-30, for example, to about 20 um.

### Surface Modifications

[0156] Provided herein are methods for polynucleotide synthesis on a surface, wherein the surface comprises various surface modifications. In some instances, the surface modifications are employed for the chemical and/or physical alteration of a surface by an additive or subtractive process to change one or more chemical and/or physical properties of a substrate surface or a selected site or region of a substrate surface. For example, surface modifications include, without limitation, (1) changing the wetting properties of a surface, (2) functionalizing a surface, i.e., providing, modifying or substituting surface functional groups, (3) defunctionalizing a surface, i.e., removing surface functional groups, (4) otherwise altering the chemical composition of a surface, e.g., through etching, (5) increasing or decreasing surface roughness, (6) providing a coating on a surface, e.g., a coating that exhibits wetting properties that are different from the wetting properties of the surface, and/or (7) depositing particulates on a surface.

[0157] In some cases, the addition of a chemical layer on top of a surface (referred to as adhesion promoter) facilitates structured patterning of loci on a surface of a substrate. Exemplary surfaces for application of adhesion promotion include, without limitation, glass, silicon, silicon dioxide and silicon nitride. In some cases, the adhesion promoter is a chemical with a high surface energy. In some instances, a second chemical layer is deposited on a surface of a substrate. In some cases, the second chemical layer has a low surface energy. In some cases, surface energy of a chemical layer coated on a surface supports localization of droplets on the surface. Depending on the patterning arrangement selected, the proximity of loci and/or area of fluid contact at the loci are alterable.

[0158] In some instances, a substrate surface, or resolved loci, onto which nucleic acids or other moieties are deposited, e.g., for polynucleotide synthesis, are smooth or substantially planar (e.g., two-dimensional) or have irregularities, such as raised or lowered features (e.g., three-dimensional features). In some instances, a substrate surface is modified with one or more different layers of compounds. Such modification layers of interest include, without limitation, inorganic and organic layers such as metals, metal oxides, polymers, small organic molecules, and the like.

[0159] In some instances, resolved loci of a substrate are functionalized with one or more moieties that increase and/or decrease surface energy. In some cases, a moiety is chemically inert. In some cases, a moiety is configured to support a desired chemical reaction, for example, one or more processes in a polynucleotide synthesis reaction. The surface energy, or hydrophobicity, of a surface is a factor for determining the affinity of a nucleotide to attach onto the surface. In some instances, a method for substrate functionalization comprises: (a) providing a substrate having a surface that comprises silicon dioxide; and (b) silanizing the surface using a suitable silanizing agent described herein or otherwise known in the art, for example, an organofunctional alkoxysilane molecule. Methods and functionalizing agents are described in U.S. Pat. No. 5,474,796, which is herein incorporated by reference in its entirety.

[0160] In some instances, a substrate surface is functionalized by contact with a derivatizing composition that contains a mixture of silanes, under reaction conditions effective to couple the silanes to the substrate surface, typically via reactive hydrophilic moieties present on the substrate surface. Silanization generally covers a surface through self-assembly with organofunctional alkoxysilane molecules. A variety of siloxane functionalizing reagents can further be used as currently known in the art, e.g., for lowering or increasing surface energy. The organofunctional alkoxysilanes are classified according to their organic functions.

### Polynucleotide Synthesis

[0161] Methods of the current disclosure for polynucleotide synthesis may include processes involving phosphoramidite chemistry. In some instances, polynucleotide synthesis comprises coupling a base with phosphoramidite. Polynucleotide synthesis may comprise coupling a base by deposition of phosphoramidite under coupling conditions, wherein the same base is optionally deposited with phosphoramidite more than once, i.e., double coupling. Polynucleotide synthesis may comprise capping of unreacted sites. In some instances, capping is optional. Polynucleotide synthesis may also comprise oxidation or an oxidation step or oxidation steps. Polynucleotide synthesis may comprise deblocking, detritylation, and sulfurization. In some instances, polynucleotide synthesis comprises either oxidation or sulfurization. In some instances, between one or each step during a polynucleotide synthesis reaction, the device is washed, for example, using tetrazole or acetonitrile. Time frames for any one step in a phosphoramidite synthesis method may be less than about 2 min, 1 min, 50 sec, 40 sec, 30 sec, 20 sec and 10 sec.

[0162] Polynucleotide synthesis using a phosphoramidite method may comprise a subsequent addition of a phosphoramidite building block (e.g., nucleoside phosphoramidite) to a growing polynucleotide chain for the formation of a phosphite triester linkage. Phosphoramidite polynucleotide synthesis proceeds in the 3′ to 5′ direction. Phosphoramidite polynucleotide synthesis allows for the controlled addition of one nucleotide to a growing nucleic acid chain per synthesis cycle. In some instances, each synthesis cycle comprises a coupling step. Phosphoramidite coupling involves the formation of a phosphite triester linkage between an activated nucleoside phosphoramidite and a nucleoside bound to the substrate, for example, via a linker. In some instances, the nucleoside phosphoramidite is provided to the device activated. In some instances, the nucleoside phosphoramidite is provided to the device with an activator. In some instances, nucleoside phosphoramidites are provided to the device in a 1.5, 2, 3, 4, 5, 6, 7, 8, 9, 10, 11, 12, 13, 14, 15, 16, 17, 18, 19, 20, 25, 30, 35, 40, 50, 60, 70, 80, 90, 100-fold excess or more over the substrate-bound nucleosides. In some instances, the addition of nucleoside phosphoramidite is performed in an anhydrous environment, for example, in anhydrous acetonitrile. Following addition of a nucleoside phosphoramidite, the device is optionally washed. In some instances, the coupling step is repeated one or more additional times, optionally with a wash step between nucleoside phosphoramidite additions to the substrate. In some instances, a polynucleotide synthesis method used herein comprises 1, 2, 3 or more sequential coupling steps. Prior to coupling, in many cases, the nucleoside bound to the device is de-protected by removal of a protecting group, where the protecting group functions to prevent polymerization. A common protecting group is 4,4′-dimethoxytrityl (DMT).

[0163] Following coupling, phosphoramidite polynucleotide synthesis methods optionally comprise a capping step. In a capping step, the growing polynucleotide is treated with a capping agent. A capping step is useful to block unreacted substrate-bound 5′—OH groups after coupling from further chain elongation, preventing the formation of polynucleotides with internal base deletions. Further, phosphoramidites activated with 1H-tetrazole may react, to a small extent, with the 06 position of guanosine. Without being bound by theory, upon oxidation with 12/water, this side product, possibly via 06-N7 migration, may undergo depurination. The apurinic sites may end up being cleaved in the course of the final deprotection of the polynucleotide thus reducing the yield of the full-length product. The 06 modifications may be removed by treatment with the capping reagent prior to oxidation with 12/water. In some instances, inclusion of a capping step during polynucleotide synthesis decreases the error rate as compared to synthesis without capping. As an example, the capping step comprises treating the substrate-bound polynucleotide with a mixture of acetic anhydride and 1-methylimidazole. Following a capping step, the device is optionally washed.

[0164] In some instances, following addition of a nucleoside phosphoramidite, and optionally after capping and one or more wash steps, the device bound growing nucleic acid is oxidized. The oxidation step comprises a phosphite triester which is oxidized into a tetracoordinated phosphate triester, a protected precursor of the naturally occurring phosphate diester internucleoside linkage. In some instances, oxidation of the growing polynucleotide is achieved by treatment with iodine and water, optionally in the presence of a weak base (e.g., pyridine, lutidine, collidine). Oxidation may be carried out under anhydrous conditions using, e.g. tert-Butyl hydroperoxide or (1S)-(+)-(10-camphorsulfonyl)-oxaziridine (CSO). In some methods, a capping step is performed following oxidation. A second capping step allows for device drying, as residual water from oxidation that may persist can inhibit subsequent coupling. Following oxidation, the device and growing polynucleotide are optionally washed. In some instances, the step of oxidation is substituted with a sulfurization step to obtain polynucleotide phosphorothioates, wherein any capping steps can be performed after the sulfurization. Many reagents are capable of the efficient sulfur transfer, including but not limited to 3-(Dimethylaminomethylidene)amino)-3H-1,2,4-dithiazole-3-thione, DDTT, 3H-1,2-benzodithiol-3-one 1,1-dioxide, also known as Beaucage reagent, and N,N,N′N′-Tetraethylthiuram disulfide (TETD).

[0165] In order for a subsequent cycle of nucleoside incorporation to occur through coupling, the protected 5′ end of the device bound growing polynucleotide is removed so that the primary hydroxyl group is reactive with a next nucleoside phosphoramidite. In some instances, the protecting group is DMT and deblocking occurs with trichloroacetic acid in dichloromethane. Conducting detritylation for an extended time or with stronger than recommended solutions of acids may lead to increased depurination of solid support-bound polynucleotide and thus reduces the yield of the desired full-length product. Methods and compositions of the disclosure described herein provide for controlled deblocking conditions limiting undesired depurination reactions. In some instances, the device bound polynucleotide is washed after deblocking. In some instances, efficient washing after deblocking contributes to synthesized polynucleotides having a low error rate.

[0166] Methods for the synthesis of polynucleotides typically involve an iterating sequence of the following steps: application of a protected monomer to an actively functionalized surface (e.g., locus) to link with either the activated surface, a linker or with a previously deprotected monomer; deprotection of the applied monomer so that it is reactive with a subsequently applied protected monomer; and application of another protected monomer for linking. One or more intermediate steps include oxidation or sulfurization. In some instances, one or more wash steps precede or follow one or all of the steps.

[0167] Methods for phosphoramidite-based polynucleotide synthesis comprise a series of chemical steps. In some instances, one or more steps of a synthesis method involve reagent cycling, where one or more steps of the method comprise application to the device of a reagent useful for the step. For example, reagents are cycled by a series of liquid deposition and vacuum drying steps. For substrates comprising three-dimensional features such as wells, microwells, channels and the like, reagents are optionally passed through one or more regions of the device via the wells and/or channels.

[0168] Methods and systems described herein relate to polynucleotide synthesis devices for the synthesis of polynucleotides. The synthesis may be in parallel. For example, at least or about at least 2, 3, 4, 5, 6, 7, 8, 9, 10, 11, 12, 13, 14, 15, 16, 17, 18, 19, 20, 21, 22, 23, 24, 25, 30, 35, 40, 45, 50, 100, 150, 200, 250, 300, 350, 400, 450, 500, 550, 600, 650, 700, 750, 800, 850, 900, 1000, 10000, 50000, 75000, 100000 or more polynucleotides can be synthesized in parallel. The total number polynucleotides that may be synthesized in parallel may be from 2-100000, 3-50000, 4-10000, 5-1000, 6-900, 7-850, 8-800, 9-750, 10-700, 11-650, 12-600, 13-550, 14-500, 15-450, 16-400, 17-350, 18-300, 19-250, 20-200, 21-150, 22-100, 23-50, 24-45, 25-40, 30-35. Those of skill in the art appreciate that the total number of polynucleotides synthesized in parallel may fall within any range bound by any of these values, for example 25-100. The total number of polynucleotides synthesized in parallel may fall within any range defined by any of the values serving as endpoints of the range. Total molar mass of polynucleotides synthesized within the device or the molar mass of each of the polynucleotides may be at least or at least about 10, 20, 30, 40, 50, 100, 250, 500, 750, 1000, 2000, 3000, 4000, 5000, 6000, 7000, 8000, 9000, 10000, 25000, 50000, 75000, 100000 picomoles, or more. The length of each of the polynucleotides or average length of the polynucleotides within the device may be at least or about at least 10, 15, 20, 25, 30, 35, 40, 45, 50, 100, 150, 200, 300, 400, 500 nucleotides, or more. The length of each of the polynucleotides or average length of the polynucleotides within the device may be at most or about at most 500, 400, 300, 200, 150, 100, 50, 45, 35, 30, 25, 20, 19, 18, 17, 16, 15, 14, 13, 12, 11, 10 nucleotides, or less. The length of each of the polynucleotides or average length of the polynucleotides within the device may fall from 10-500, 9-400, 11-300, 12-200, 13-150, 14-100, 15-50, 16-45, 17-40, 18-35, 19-25. Those of skill in the art appreciate that the length of each of the polynucleotides or average length of the polynucleotides within the device may fall within any range bound by any of these values, for example 100-300. The length of each of the polynucleotides or average length of the polynucleotides within the device may fall within any range defined by any of the values serving as endpoints of the range.

[0169] Methods for polynucleotide synthesis on a surface provided herein allow for synthesis at a fast rate. As an example, at least 3, 4, 5, 6, 7, 8, 9, 10, 11, 12, 13, 14, 15, 16, 17, 18, 19, 20, 21, 22, 23, 24, 25, 26, 27, 28, 29, 30, 35, 40, 45, 50, 55, 60, 70, 80, 90, 100, 125, 150, 175, 200 nucleotides per hour, or more are synthesized. Nucleotides include adenine, guanine, thymine, cytosine, uridine building blocks, or analogs/modified versions thereof. In some instances, libraries of polynucleotides are synthesized in parallel on substrate. For example, a device comprising about or at least about 100; 1,000; 10,000; 30,000; 75,000; 100,000; 1,000,000; 2,000,000; 3,000,000; 4,000,000; or 5,000,000 resolved loci is able to support the synthesis of at least the same number of distinct polynucleotides, wherein polynucleotide encoding a distinct sequence is synthesized on a resolved locus. In some instances, a library of polynucleotides is synthesized on a device with low error rates described herein in less than about three months, two months, one month, three weeks, 15, 14, 13, 12, 11, 10, 9, 8, 7, 6, 5, 4, 3, 2 days, 24 hours, or less. In some instances, larger nucleic acids assembled from a polynucleotide library synthesized with low error rate using the substrates and methods described herein are prepared in less than about three months, two months, one month, three weeks, 15, 14, 13, 12, 11, 10, 9, 8, 7, 6, 5, 4, 3, 2 days, 24 hours, or less.

[0170] In some instances, methods described herein provide for generation of a library of nucleic acids comprising variant nucleic acids differing at a plurality of codon sites. In some instances, a nucleic acid may have 1 site, 2 sites, 3 sites, 4 sites, 5 sites, 6 sites, 7 sites, 8 sites, 9 sites, 10 sites, 11 sites, 12 sites, 13 sites, 14 sites, 15 sites, 16 sites, 17 sites 18 sites, 19 sites, 20 sites, 30 sites, 40 sites, 50 sites, or more of variant codon sites.

[0171] In some instances, the one or more sites of variant codon sites may be adjacent. In some instances, the one or more sites of variant codon sites may not be adjacent but are separated by 1, 2, 3, 4, 5, 6, 7, 8, 9, 10, or more codons.

[0172] In some instances, a nucleic acid may comprise multiple sites of variant codon sites, wherein all the variant codon sites are adjacent to one another, forming a stretch of variant codon sites. In some instances, a nucleic acid may comprise multiple sites of variant codon sites, wherein none the variant codon sites are adjacent to one another. In some instances, a nucleic acid may comprise multiple sites of variant codon sites, wherein some the variant codon sites are adjacent to one another, forming a stretch of variant codon sites, and some of the variant codon sites are not adjacent to one another.

[0173] Referring to the Figures, FIG. 3 illustrates an exemplary process workflow for synthesis of nucleic acids (e.g., genes) from shorter nucleic acids. The workflow is divided generally into phases: (1) de novo synthesis of a single stranded nucleic acid library, (2) joining nucleic acids to form larger fragments, (3) error correction, (4) quality control, and (5) shipment. Prior to de novo synthesis, an intended nucleic acid sequence or group of nucleic acid sequences is preselected. For example, a group of genes is preselected for generation.

[0174] Once large nucleic acids for generation are selected, a predetermined library of nucleic acids is designed for de novo synthesis. Various suitable methods are known for generating high density polynucleotide arrays. In the workflow example, a device surface layer 301 is provided. In the example, chemistry of the surface is altered in order to improve the polynucleotide synthesis process. Areas of low surface energy are generated to repel liquid while areas of high surface energy are generated to attract liquids. The surface itself may be in the form of a planar surface or contain variations in shape, such as protrusions or microwells which increase surface area. In the workflow example, high surface energy molecules selected serve a dual function of supporting DNA chemistry, as disclosed in International Patent Application Publication WO/2015/021080, which is herein incorporated by reference in its entirety.

[0175] In situ preparation of polynucleotide arrays is generated on a solid support 301 and utilizes single nucleotide extension process to extend multiple oligomers in parallel. A deposition device, such as a material deposition device, is designed to release reagents in a step-wise fashion such that multiple polynucleotides extend, in parallel, one residue at a time to generate oligomers with a predetermined nucleic acid sequence 302. In some instances, polynucleotides are cleaved from the surface at this stage. Cleavage includes gas cleavage, e.g., with ammonia or methylamine.

[0176] The generated polynucleotide libraries are placed in a reaction chamber. In this exemplary workflow, the reaction chamber (also referred to as “nanoreactor”) is a silicon coated well, containing PCR reagents and lowered onto the polynucleotide library 303. Prior to or after the sealing 304 of the polynucleotides, a reagent is added to release the polynucleotides from the substrate. In the exemplary workflow, the polynucleotides are released subsequent to sealing of the nanoreactor 305. Once released, fragments of single stranded polynucleotides hybridize in order to span an entire long-range sequence of DNA. Partial hybridization 305 is possible because each synthesized polynucleotide is designed to have a small portion overlapping with at least one other polynucleotide in the pool.

[0177] After hybridization, a PCA reaction is commenced. During the polymerase cycles, the polynucleotides anneal to complementary fragments and gaps are filled in by a polymerase. Each cycle increases the length of various fragments randomly depending on which polynucleotides find each other. Complementarity amongst the fragments allows for formation of a complete large span of double stranded DNA 306.

[0178] After PCA is complete, the nanoreactor is separated from the device 307 and positioned for interaction with a device having primers for PCR 308. After sealing, the nanoreactor is subject to PCR 309 and the larger nucleic acids are amplified. After PCR 310, the nanochamber is opened 311, error correction reagents are added 312, the chamber is sealed 313 and an error correction reaction occurs to remove mismatched base pairs and/or strands with poor complementarity from the double stranded PCR amplification products 314. The nanoreactor is opened and separated 315. Error corrected product is next subject to additional processing steps, such as PCR and molecular bar coding, and then packaged 322 for shipment 323.

[0179] In some instances, quality control measures are taken. After error correction, quality control steps include for example interaction with a wafer having sequencing primers for amplification of the error corrected product 316, sealing the wafer to a chamber containing error corrected amplification product 317, and performing an additional round of amplification 318. The nanoreactor is opened 319 and the products are pooled 320 and sequenced 321. After an acceptable quality control determination is made, the packaged product 322 is approved for shipment 323.

[0180] In some instances, a nucleic acid generated by a workflow such as that in FIG. 3 is subject to mutagenesis using overlapping primers disclosed herein. In some instances, a library of primers is generated by in situ preparation on a solid support and utilize single nucleotide extension process to extend multiple oligomers in parallel. A deposition device, such as a material deposition device, is designed to release reagents in a step wise fashion such that multiple polynucleotides extend, in parallel, one residue at a time to generate oligomers with a predetermined nucleic acid sequence 302.

### Computer Systems

[0181] Any of the systems described herein, may be operably linked to a computer and may be automated through a computer either locally or remotely. In various instances, the methods and systems of the disclosure may further comprise software programs on computer systems and use thereof. Accordingly, computerized control for the synchronization of the dispense/vacuum/refill functions such as orchestrating and synchronizing the material deposition device movement, dispense action and vacuum actuation are within the bounds of the disclosure. The computer systems may be programmed to interface between the user specified base sequence and the position of a material deposition device to deliver the correct reagents to specified regions of the substrate.

[0182] The computer system 400 illustrated in FIG. 4 may be understood as a logical apparatus that can read instructions from media 411 and/or a network port 405, which can optionally be connected to server 409 having fixed media 412. The system, such as shown in FIG. 4 can include a CPU 401, disk drives 403, optional input devices such as keyboard 415 and/or mouse 416 and optional monitor 407. Data communication can be achieved through the indicated communication medium to a server at a local or a remote location. The communication medium can include any means of transmitting and/or receiving data. For example, the communication medium can be a network connection, a wireless connection or an internet connection. Such a connection can provide for communication over the World Wide Web. It is envisioned that data relating to the present disclosure can be transmitted over such networks or connections for reception and/or review by a party 422 as illustrated in FIG. 4.

[0183] FIG. 5 is a block diagram illustrating a first example architecture of a computer system 500 that can be used in connection with example instances of the present disclosure. As depicted in FIG. 5, the example computer system can include a processor 502 for processing instructions. Non-limiting examples of processors include: Intel Xeon™ processor, AMD Opteron™ processor, Samsung 32-bit RISC ARM 1176JZ(F)-S v1.0™ processor, ARM Cortex-A8 Samsung S5PC100™ processor, ARM Cortex-A8 Apple A4™ processor, Marvell PXA 930™ processor, or a functionally-equivalent processor. Multiple threads of execution can be used for parallel processing. In some instances, multiple processors or processors with multiple cores can also be used, whether in a single computer system, in a cluster, or distributed across systems over a network comprising a plurality of computers, cell phones, and/or personal data assistant devices.

[0184] As illustrated in FIG. 5, a high-speed cache 504 can be connected to, or incorporated in, the processor 502 to provide a high speed memory for instructions or data that have been recently, or are frequently, used by the processor 502. The processor 502 is connected to a north bridge 506 by a processor bus 508. The north bridge 506 is connected to random access memory (RAM) 510 by a memory bus 512 and manages access to the RAM 510 by the processor 502. The north bridge 506 is also connected to a south bridge 514 by a chipset bus 516. The south bridge 514 is, in turn, connected to a peripheral bus 518. The peripheral bus can be, for example, PCI, PCI-X, PCI Express, or other peripheral bus. The north bridge and south bridge are often referred to as a processor chipset and manage data transfer between the processor, RAM, and peripheral components on the peripheral bus 518. In some alternative architectures, the functionality of the north bridge can be incorporated into the processor instead of using a separate north bridge chip. In some instances, system 500 can include an accelerator card 522 attached to the peripheral bus 518. The accelerator can include field programmable gate arrays (FPGAs) or other hardware for accelerating certain processing. For example, an accelerator can be used for adaptive data restructuring or to evaluate algebraic expressions used in extended set processing.

[0185] Software and data are stored in external storage 524 and can be loaded into RAM 510 and/or cache 504 for use by the processor. The system 500 includes an operating system for managing system resources; non-limiting examples of operating systems include: Linux®, Windows®, MACOS®, BlackBerry® OS™, BlackBerry® iOS®, and other functionally-equivalent operating systems, as well as application software running on top of the operating system for managing data storage and optimization in accordance with example instances of the present disclosure. In this example, system 500 also includes network interface cards (NICs) 520 and 521 connected to the peripheral bus for providing network interfaces to external storage, such as Network Attached Storage (NAS) and other computer systems that can be used for distributed parallel processing.

[0186] FIG. 6 is a diagram showing a network 600 with a plurality of computer systems 602a, and 602b, a plurality of cell phones and personal data assistants 602c, and Network Attached Storage (NAS) 604a, and 604b. In example instances, systems 602a, 602b, and 602c can manage data storage and optimize data access for data stored in Network Attached Storage (NAS) 604a and 604b. A mathematical model can be used for the data and be evaluated using distributed parallel processing across computer systems 602a, and 602b, and cell phone and personal data assistant systems 602c. Computer systems 602a, and 602b, and cell phone and personal data assistant systems 602c can also provide parallel processing for adaptive data restructuring of the data stored in Network Attached Storage (NAS) 604a and 604b. FIG. 6 illustrates an example only, and a wide variety of other computer architectures and systems can be used in conjunction with the various instances of the present disclosure. For example, a blade server can be used to provide parallel processing. Processor blades can be connected through a back plane to provide parallel processing. Storage can also be connected to the back plane or as Network Attached Storage (NAS) through a separate network interface. In some example instances, processors can maintain separate memory spaces and transmit data through network interfaces, back plane or other connectors for parallel processing by other processors. In other instances, some or all of the processors can use a shared virtual address memory space.

[0187] FIG. 7 is a block diagram of a multiprocessor computer system 700 using a shared virtual address memory space in accordance with an example instance. The system includes a plurality of processors 702 that can access a shared memory subsystem 704. The system incorporates a plurality of programmable hardware memory algorithm processors (MAPs) 706a-f in the memory subsystem 704. Each MAP 706a-f can comprise a memory 708a-f and one or more field programmable gate arrays (FPGAs) 710a-f. The MAP provides a configurable functional unit and particular algorithms or portions of algorithms can be provided to the FPGAs 710a-f for processing in close coordination with a respective processor. For example, the MAPs can be used to evaluate algebraic expressions regarding the data model and to perform adaptive data restructuring in example instances. In this example, each MAP is globally accessible by all of the processors for these purposes. In one configuration, each MAP can use Direct Memory Access (DMA) to access an associated memory 708a-f, allowing it to execute tasks independently of, and asynchronously from the respective microprocessor 702a-f. In this configuration, a MAP can feed results directly to another MAP for pipelining and parallel execution of algorithms.

[0188] The above computer architectures and systems are examples only, and a wide variety of other computer, cell phone, and personal data assistant architectures and systems can be used in connection with example instances, including systems using any combination of general processors, co-processors, FPGAs and other programmable logic devices, system on chips (SOCs), application specific integrated circuits (ASICs), and other processing and logic elements. In some instances, all or part of the computer system can be implemented in software or hardware. Any variety of data storage media can be used in connection with example instances, including random access memory, hard drives, flash memory, tape drives, disk arrays, Network Attached Storage (NAS) and other local or distributed data storage devices and systems.

[0189] In example instances, the computer system can be implemented using software modules executing on any of the above or other computer architectures and systems. In other instances, the functions of the system can be implemented partially or completely in firmware, programmable logic devices such as field programmable gate arrays (FPGAs) as referenced in FIG. 5, system on chips (SOCs), application specific integrated circuits (ASICs), or other processing and logic elements. For example, the Set Processor and Optimizer can be implemented with hardware acceleration through the use of a hardware accelerator card, such as accelerator card 522 illustrated in FIG. 5.

[0190] The following examples are set forth to illustrate more clearly the principle and practice of embodiments disclosed herein to those skilled in the art and are not to be construed as limiting the scope of any claimed embodiments. Unless otherwise stated, all parts and percentages are on a weight basis.

### EXAMPLES

[0191] The following examples are given for the purpose of illustrating various embodiments of the disclosure and are not meant to limit the present disclosure in any fashion. The present examples, along with the methods described herein are presently representative of preferred embodiments, are exemplary, and are not intended as limitations on the scope of the disclosure. Changes therein and other uses which are encompassed within the spirit of the disclosure as defined by the scope of the claims will occur to those skilled in the art.

### Example 1: Functionalization of a Device Surface

[0192] A device was functionalized to support the attachment and synthesis of a library of polynucleotides. The device surface was first wet cleaned using a piranha solution comprising 90% H₂SO₄ and 10% H₂O₂ for 20 minutes. The device was rinsed in several beakers with DI water, held under a DI water gooseneck faucet for 5 min, and dried with N₂. The device was subsequently soaked in NH₄OH (1:100; 3 mL:300 mL) for 5 min, rinsed with DI water using a handgun, soaked in three successive beakers with DI water for 1 min each, and then rinsed again with DI water using the handgun. The device was then plasma cleaned by exposing the device surface to O₂. A SAMCO PC-300 instrument was used to plasma etch O₂ at 250 watts for 1 min in downstream mode.

[0193] The cleaned device surface was actively functionalized with a solution comprising N-(3-triethoxysilylpropyl)-4-hydroxybutyramide using a YES-1224P vapor deposition oven system with the following parameters: 0.5 to 1 torr, 60 min, 70° C., 135° C. vaporizer. The device surface was resist coated using a Brewer Science 200× spin coater. SPR™ 3612 photoresist was spin coated on the device at 2500 rpm for 40 sec. The device was pre-baked for 30 min at 90° C. on a Brewer hot plate. The device was subjected to photolithography using a Karl Suss MA6 mask aligner instrument. The device was exposed for 2.2 sec and developed for 1 min in MSF 26A. Remaining developer was rinsed with the handgun and the device soaked in water for 5 min. The device was baked for 30 min at 100° C. in the oven, followed by visual inspection for lithography defects using a Nikon L200. A descum process was used to remove residual resist using the SAMCO PC-300 instrument to O₂ plasma etch at 250 watts for 1 min.

[0194] The device surface was passively functionalized with a 100 μL solution of perfluorooctyltrichlorosilane mixed with 10 μL light mineral oil. The device was placed in a chamber, pumped for 10 min, and then the valve was closed to the pump and left to stand for 10 min. The chamber was vented to air. The device was resist stripped by performing two soaks for 5 min in 500 mL NMP at 70° C. with ultrasonication at maximum power (9 on Crest system). The device was then soaked for 5 min in 500 mL isopropanol at room temperature with ultrasonication at maximum power. The device was dipped in 300 mL of 200 proof ethanol and blown dry with N2. The functionalized surface was activated to serve as a support for polynucleotide synthesis.

### Example 2: Synthesis of a 50-Mer Sequence on an Oligonucleotide Synthesis Device

[0195] A two-dimensional oligonucleotide synthesis device was assembled into a flowcell, which was connected to a flowcell (Applied Biosystems® “ABI394 DNA Synthesizer”). The two-dimensional oligonucleotide synthesis device was uniformly functionalized with N-(3-TRIETHOXYSILYLPROPYL)-4-HYDROXYBUTYRAMIDE (Gelest) which was used to synthesize an exemplary polynucleotide of 50 bp (“50-mer polynucleotide”) using polynucleotide synthesis methods described herein.

[0196] The sequence of the 50-mer was as described in SEQ ID NO: 1348. 5′AGACAATCAACCATTTGGGGTGGACAGCCTTGACCTCTAGACTTCGGCAT ##TTTTTTT TTT3′ (SEQ ID NO.: 1348), where #denotes Thymidine-succinyl hexamide CED phosphoramidite (CLP-2244 from ChemGenes), which is a cleavable linker enabling the release of oligos from the surface during deprotection.

[0197] The synthesis was done using standard DNA synthesis chemistry (coupling, capping, oxidation, and deblocking) according to the protocol in Table 3 and an ABI synthesizer.

TABLE 3
Synthesis protocols

| | Table 3 | |
|---|---|---|
| General DNA Synthesis | | Time |
| Process Name | Process Step | (sec) |
| WASH (Acetonitrile Wash | Acetonitrile System Flush | 4 |
| Flow) | Acetonitrile to Flowcell | 23 |
| | N2 System Flush | 4 |
| | Acetonitrile System Flush | 4 |
| DNA BASE ADDITION | Activator Manifold Flush | 2 |
| (Phosphoramidite + | Activator to Flowcell | 6 |
| Activator Flow) | Activator + | 6 |
| | Phosphoramidite to | |
| | Flowcell | |
| | Activator to Flowcell | 0.5 |
| | Activator + | 5 |
| | Phosphoramidite to | |
| | Flowcell | |
| | Activator to Flowcell | 0.5 |
| | Activator + | 5 |
| | Phosphoramidite to | |
| | Flowcell | |
| | Activator to Flowcell | 0.5 |
| | Activator + | 5 |
| | Phosphoramidite to | |
| | Flowcell | |
| | Incubate for 25 sec | 25 |
| WASH (Acetonitrile Wash | Acetonitrile System Flush | 4 |
| Flow) | Acetonitrile to Flowcell | 15 |
| | N2 System Flush | 4 |
| | Acetonitrile System Flush | 4 |
| DNA BASE ADDITION | Activator Manifold Flush | 2 |
| (Phosphoramidite + | Activator to Flowcell | 5 |
| Activator Flow) | Activator + | 18 |
| | Phosphoramidite to | |
| | Flowcell | |
| | Incubate for 25 sec | 25 |
| WASH (Acetonitrile Wash | Acetonitrile System Flush | 4 |
| Flow) | Acetonitrile to Flowcell | 15 |
| | N2 System Flush | 4 |
| | Acetonitrile System Flush | 4 |
| CAPPING (CapA + B, | CapA + B to Flowcell | 15 |
| 1:1, Flow) | | |
| WASH (Acetonitrile Wash | Acetonitrile System Flush | 4 |
| Flow) | Acetonitrile to Flowcell | 15 |
| | Acetonitrile System Flush | 4 |
| OXIDATION (Oxidizer | Oxidizer to Flowcell | 18 |
| Flow) | | |
| WASH (Acetonitrile Wash | Acetonitrile System Flush | 4 |
| Flow) | N2 System Flush | 4 |
| | Acetonitrile System Flush | 4 |
| | Acetonitrile to Flowcell | 15 |
| | Acetonitrile System Flush | 4 |
| | Acetonitrile to Flowcell | 15 |
| | N2 System Flush | 4 |
| | Acetonitrile System Flush | 4 |
| | Acetonitrile to Flowcell | 23 |
| | N2 System Flush | 4 |
| | Acetonitrile System Flush | 4 |
| DEBLOCKING (Deblock | Deblock to Flowcell | 36 |
| Flow) | | |
| WASH (Acetonitrile Wash | Acetonitrile System Flush | 4 |
| Flow) | N2 System Flush | 4 |
| | Acetonitrile System Flush | 4 |
| | Acetonitrile to Flowcell | 18 |
| | N2 System Flush | 4.13 |
| | Acetonitrile System Flush | 4.13 |
| | Acetonitrile to Flowcell | 15 |

[0198] The phosphoramidite/activator combination was delivered similarly to the delivery of bulk reagents through the flowcell. No drying steps were performed as the environment stays “wet” with reagent the entire time.

[0199] The flow restrictor was removed from the ABI 394 synthesizer to enable faster flow. Without flow restrictor, flow rates for amidites (0.1M in ACN), Activator, (0.25M Benzoylthiotetrazole (“BTT”; 30-3070-xx from GlenResearch) in ACN), and Ox (0.02M I2 in 20% pyridine, 10% water, and 70% THF) were roughly ˜100 uL/sec, for acetonitrile (“ACN”) and capping reagents (1:1 mix of CapA and CapB, wherein CapA is acetic anhydride in THF/Pyridine and CapB is 16% 1-methylimidizole in THF), roughly ˜200 uL/sec, and for Deblock (3% dichloroacetic acid in toluene), roughly ˜300 uL/sec (compared to ˜50 uL/sec for all reagents with flow restrictor). The time to completely push out Oxidizer was observed, the timing for chemical flow times was adjusted accordingly and an extra ACN wash was introduced between different chemicals. After polynucleotide synthesis, the chip was deprotected in gaseous ammonia overnight at 75 psi. Five drops of water were applied to the surface to recover polynucleotides. The recovered polynucleotides were then analyzed on a BioAnalyzer small RNA chip.

### Example 3: Synthesis of a 100-Mer Sequence on an Oligonucleotide Synthesis Device

[0200] The same process as described in Example 2 for the synthesis of the 50-mer sequence was used for the synthesis of a 100-mer polynucleotide (“100-mer polynucleotide”; 5′ CGGGATCCTTATCGTCATCGTCGTACAGATCCCGACCCATTTGCTGTCCACCAGTCATG CTAGCCATACCATGATGATGATGATGATGAGAACCCCGCAT ##TTTTTTTTTT3′, where #denotes Thymidine-succinyl hexamide CED phosphoramidite (CLP-2244 from ChemGenes); SEQ ID NO.: 1349) on two different silicon chips, the first one uniformly functionalized with N-(3-TRIETHOXYSILYLPROPYL)-4-HYDROXYBUTYRAMIDE and the second one functionalized with 5/95 mix of 11-acetoxyundecyltriethoxysilane and n-decyltriethoxysilane, and the polynucleotides extracted from the surface were analyzed on a BioAnalyzer instrument.

[0201] All ten samples from the two chips were further PCR amplified using a forward (5′ATGCGGGGTTCTCATCATC3′; SEQ ID NO.: 1350) and a reverse (5′CGGGATCCTTATCGTCATCG3′; SEQ ID NO.: 1351) primer in a 50 uL PCR mix (25 uL NEB Q5 mastermix, 2.5 uL 10 uM Forward primer, 2.5 uL 10 uM Reverse primer, 1 uL polynucleotide extracted from the surface, and water up to 50 uL) using the following thermalcycling program:
[0202] 98° C., 30 sec
[0203] 98° C., 10 sec; 63° C., 10 sec; 72° C., 10 sec; repeat 12 cycles
[0204] 72° C., 2 min

[0205] The PCR products were also run on a BioAnalyzer, demonstrating sharp peaks at the 100-mer position. Next, the PCR amplified samples were cloned, and Sanger sequenced. Table 4 summarizes the results from the Sanger sequencing for samples taken from spots 1-5 from chip 1 and for samples taken from spots 6-10 from chip 2.

TABLE 4
Sequencing results

| | | | Cycle |
|---|---|---|---|
| Spot | Error rate | | efficiency |
| 1 | 1/763 | bp | 99.87% |
| 2 | 1/824 | bp | 99.88% |
| 3 | 1/780 | bp | 99.87% |
| 4 | 1/429 | bp | 99.77% |
| 5 | 1/1525 | bp | 99.93% |
| 6 | 1/1615 | bp | 99.94% |
| 7 | 1/531 | bp | 99.81% |
| 8 | 1/1769 | bp | 99.94% |
| 9 | 1/854 | bp | 99.88% |
| 10 | 1/1451 | bp | 99.93% |

[0206] Thus, the high quality and uniformity of the synthesized polynucleotides were repeated on two chips with different surface chemistries. Overall, 89% of the 100-mers that were sequenced were perfect sequences with no errors, corresponding to 233 out of 262.

[0207] Table 5 summarizes error characteristics for the sequences obtained from the polynucleotide samples from spots 1-10.

TABLE 5
Error characteristics

| Sample | | | | | | | | | | |
|---|---|---|---|---|---|---|---|---|---|---|
| ID/Spot | OSA_ | OSA_ | OSA_ | OSA_ | OSA_ | OSA_ | OSA_ | OSA_ | OSA_ | OSA_ |
| no. | 0046/1 | 0047/2 | 0048/3 | 0049/4 | 0050/5 | 0051/6 | 0052/7 | 0053/8 | 0054/9 | 0055/10 |
| Total | 32 | 32 | 32 | 32 | 32 | 32 | 32 | 32 | 32 | 32 |
| Sequences | | | | | | | | | | |
| Sequencing | 25 of 28 | 27 of 27 | 26 of 30 | 21 of 23 | 25 of 26 | 29 of 30 | 27 of 31 | 29 of 31 | 28 of 29 | 25 of 28 |
| Quality | | | | | | | | | | |
| Oligo | 23 of 25 | 25 of 27 | 22 of 26 | 18 of 21 | 24 of 25 | 25 of 29 | 22 of 27 | 28 of 29 | 26 of 28 | 20 of 25 |
| Quality | | | | | | | | | | |
| ROI | 2500 | 2698 | 2561 | 2122 | 2499 | 2666 | 2625 | 2899 | 2798 | 2348 |
| Match | | | | | | | | | | |
| Count | | | | | | | | | | |
| ROI | 2 | 2 | 1 | 3 | 1 | 0 | 2 | 1 | 2 | 1 |
| Mutation | | | | | | | | | | |
| ROI Multi | 0 | 0 | 0 | 0 | 0 | 0 | 0 | 0 | 0 | 0 |
| Base | | | | | | | | | | |
| Deletion | | | | | | | | | | |
| ROI Small | 1 | 0 | 0 | 0 | 0 | 0 | 0 | 0 | 0 | 0 |
| Insertion | | | | | | | | | | |
| ROI | 0 | 0 | 0 | 0 | 0 | 0 | 0 | 0 | 0 | 0 |
| Single | | | | | | | | | | |
| Base | | | | | | | | | | |
| Deletion | | | | | | | | | | |
| Large | 0 | 0 | 1 | 0 | 0 | 1 | 1 | 0 | 0 | 0 |
| Deletion | | | | | | | | | | |
| Count | | | | | | | | | | |
| Mutation: | 2 | 2 | 1 | 2 | 1 | 0 | 2 | 1 | 2 | 1 |
| G > A | | | | | | | | | | |
| Mutation: | 0 | 0 | 0 | 1 | 0 | 0 | 0 | 0 | 0 | 0 |
| T > C | | | | | | | | | | |
| ROI Error | 3 | 2 | 2 | 3 | 1 | 1 | 3 | 1 | 2 | 1 |
| Count | | | | | | | | | | |
| ROI Error | Err: ~1 | Err: ~1 | Err: ~1 | Err: ~1 | Err: ~1 | Err: ~1 | Err: ~1 | Err: ~1 | Err: ~1 | Err: ~1 |
| Rate | in 834 | in 1350 | in 1282 | in 708 | in 2500 | in 2667 | in 876 | in 2900 | in 1400 | in 2349 |
| ROI | MP Err: | MP Err: | MP Err: | MP Err: | MP Err: | MP Err: | MP Err: | MP Err: | MP Err: | MP Err: |
| Minus | ~1 in | ~1 in | ~1 in | ~1 in | ~1 in | ~1 in | ~1 in | ~1 in | ~1 in | ~1 in |
| Primer | 763 | 824 | 780 | 429 | 1525 | 1615 | 531 | 1769 | 854 | 1451 |
| Error Rate | | | | | | | | | | |

### Example 4: Functional GLP-1R Antibodies Identified from a Synthetic GPCR-Focused Library Demonstrate Potent Blood Glucose Control

[0208] This example describes the identification of antagonistic and agonistic GLP-1R antibodies with in vitro and in vivo functional activity.

### Materials and Method

### Stable Cell Line and Phage Library Generation

[0209] The full length human GLP-1R gene (UniProt—P43220) with an N-terminal FLAG tag and C-terminal GFP tag cloned into pCDNA3.1(+) vector (ThermoFisher) was transfected into suspension Chinese Hamster Ovary (CHO) cells to generate the stable cell line expressing GLP-1R. Target expression was confirmed by FACS. Cells expressing>80% of GLP-1R by GFP were then directly used for cell-based selections.

[0210] Germline heavy chain IGHV1-69, IGHV3-30 and germline light chain IGKV1-39, IGKV3-15, IGLV1-51, IGLV2-14 framework combinations were used in the GPCR-focused phage-displayed library, and all six CDR diversities were encoded by oligo pools synthesized similar to Examples 1-3 above. The CDRs were also screened to ensure they did not contain manufacturability liabilities, cryptic splice sites, or commonly used nucleotide restriction sites. The heavy chain variable region (VH) and light chain variable region (VL) were linked by (G4S)3 linker (SEQ ID NO: 1520). The resulting scFv (VH-linker-VL) gene library was cloned into a pADL 22-2c (Antibody Design Labs) phage display vector by NotI restriction digestion and electroporated into TG1 electro-competent E. coli cells. (Lucigen). The final library has a diversity of 1.1×10¹⁰ size, which was verified by NGS.

Panning and Screening Strategy Used to Isolate Agonist GLP-1R scFv Clones

[0211] Before panning on GLP-1R expressing CHO cells, phage particles were blocked with 5% BSA/PBS and depleted for non-specific binders on CHO parent cells. For CHO parent cell depletion, the input phage aliquot was rotated at 14 rpm/min with 1×10⁸ CHO parent cells for 1 hour at room temperature (RT). The cells were then pelleted by centrifuging at 1,200 rpm for 10 mins in a tabletop Eppendorf centrifuge 5920RS/4×1000 rotor to deplete the non-specific CHO cell binders. The phage supernatant, depleted of CHO cell binders, was then transferred to 1×10⁸ GLP-1R expressing CHO cells. The phage supernatant and GLP-1R expressing CHO cells were rotated at 14 rpm/min for 1 hour at RT to select for GLP-1R binders. After incubation, the cells were washed several times with 1×PBS/0.5% Tween to remove non-binding clones. To elute the phage bound to the GLP-1R cells, the cells were incubated with trypsin in PBS buffer for 30 minutes at 37° C. The cells were pelleted by centrifuging at 1,200 rpm for 10 mins. The output supernatant enriched in GLP-1R binding clones was amplified in TG1 E. coli cells to use as input phage for the next round of selection. This selection strategy was repeated for five rounds. Every round was depleted against the CHO parent background. Amplified output phage from a round was used as the input phage for the subsequent round, and the stringency of washes were increased in each subsequent round of selections with more washes. After five rounds of selection, 500 clones from each of round 4 and round 5 were Sanger sequenced to identify unique clones.

### Next-Generation Sequencing Analysis

[0212] The phagemid DNA was miniprepped from the output bacterial stocks of all panning rounds. The variable heavy chain (VH) was PCR amplified from the phagemid DNA using the Forward Primer ACAGAATTCATTAAAGAGGAGAAATTAACC (SEQ ID NO: 1521) and reverse primer TGAACCGCCTCCACCGCTAG (SEQ ID NO: 1522). The PCR product was directly used for library preparation using the KAPA HyperPlus Library Preparation Kit (Kapa Biosystems, product #KK8514). To add diversity in the library, the samples were spiked with 15% PhiX Control purchased from Illumina, Inc. (product #FC-110-3001). The library was then loaded onto Illumina's 600 cycle MiSeq® Reagent Kit v3 (Illumina, product #MS-102-3003) and run on the MiSeq® instrument.

### Reformatting and High Throughput (HT) IgG Purification

[0213] Expi293 cells were transfected using Expifectamine (ThermoFisher, A14524) with the heavy chain and light chain DNA at a 2:1 ratio and supernatants were harvested 4 days post-transfection before cell viability dropped below 80%. Purifications were undertaken using either King Fisher (ThermoFisher) with protein A magnetic beads or Phynexus protein A column tips (Hamilton). For large scale production of IgG clones that were evaluated in in vivo mouse studies, an Akta HPLC purification system (GE) was used.

[0214] IgG characterization and quality control. The purified IgGs for the positive GLP-1R binders (hits) were subjected to characterization for their purity by LabChip GXII Touch HT Protein Express high-sensitivity assay. Dithiothreitol (DTT) was used to reduce the IgG into VH and VL. IgG concentrations were measured using Lunatic (UnChain). IgG for in vivo mouse studies were further characterized by HPLC and tested for endotoxin levels (Endosafe® nexgen-PTS™ Endotoxin Testing, Charles River), with less than 5 EU per kg dosing.

### Binding Assays and Flow Cytometry

[0215] GLP-1R IgG clones were tested in a binding assay coupled to flow cytometry analysis as follows: FLAG-GLP-1R-GFP expressing CHO cells (CHO-GLP-1R) and CHO-parent cells were incubated with 100 nM IgG for 1 h on ice, washed three times and incubated with Alexa 647 conjugated goat-anti-human antibody (1:200) (Jackson ImmunoResearch Laboratories, 109-605-044) for 30 min on ice, followed by three washes, centrifuging to pellet the cells between each washing step. All incubations and washes were in buffer containing PBS+1% BSA. For titrations, IgG was serially diluted 1:3 starting from 100 nM down to 0.046 nM. Cells were analyzed by flow cytometry and hits (a hit is an IgG that specifically binds to CHO-GLP-1R) were identified by measuring the GFP signal against the Alexa 647 signal. Flow cytometry data of binding assays with 100 nM IgG are presented as dot plots. Analyses of binding assays with IgG titrations are presented as binding curves plotting IgG concentrations against MFI (mean fluorescence intensity).

### Ligand Competition Assay

[0216] Ligand competition assays involved co-incubating the primary IgG with 1 μM GLP-1 (7-36). For each data point, IgG (600 nM) was prepared in Flow buffer (PBS+1% BSA) and diluted 1:3 down for 8 titration points. Peptide GLP-1 7-36 (2 μM) was prepared similarly with the Flow buffer (PBS+1% BSA). Each well contained 100,000 cells to which 50 μL of IgG and 50 μL of peptide (=plus) or buffer alone without peptide (=minus) were added. Cells and IgG/peptide mix were incubated for 1 hr on ice, and after washing, secondary antibody (goat anti-human APC, Jackson ImmunoResearch Laboratories, product #109-605-044) diluted 1:200 in PBS+1% BSA was added. This was incubated on ice for 30 mins (50 μL per well), before washing and resuspending in 60 μL buffer. Finally, the assay read-out was measured on an Intellicyt® IQue3 Screener at a rate of 4 seconds per well.

### Cell-Based Functional Assays

[0217] cAMP assays. GLP-1R IgG clones were tested for their potential effects on GLP-1R signaling by performing cAMP assays obtained from Eurofins DiscoverX®. The technology involved in detecting cAMP levels is a no wash gain-of-signal competitive immunoassay based on Enzyme Fragment Complementation technology. Experiments were designed to test for either agonist or antagonist activity of the IgG clones. To test for agonist activity of the IgGs, cells were stimulated with IgG incubating for 30 min at 37° C. (titrations 1:3 starting from 100 nM and diluting down to 0.046 nM with PBS) or with the known agonist GLP-1 7-36 peptide (MedChemExpress, Cat. No.: HY-P005), titrated 1:6 starting from 12.5 nM and diluting down to 0.003 nM with PBS. To test for antagonist activity, cells were incubated with IgG at a fixed concentration of 100 nM for 1 h at room temperature to allow binding, followed by stimulation with GLP1 7-36 peptide (titrations 1:6 starting from 12.5 nM down to 0.003 nM in PBS) for 30 min at 37° C. Intracellular cAMP levels were detected by following the assay kit instructions.

[0218] Beta arrestin recruitment assy. β-arrestin recruitment assay was obtained from Eurofins DiscoverX® (Cat #93-0300E2) that utilized untagged GLP-1R overexpressing CHO-K1 cells. The experiment is to test if GLP1R-3 has an effect on GLP-1 7-36 agonist induced β-arrestin recruitment upon GLP-1R activation. Expanded cells were seeded into 96 well plates at 5,000 cells/well, and the experiment was performed 48 hours after plating cells. 100 nM IgG was pre-incubated for 1 hour at RT with plated cells in 50 ul volume, and then 5 ul of ligand GLP-1 7-36 was added for a further incubation for 30 min at 37° C. Add 22.5 uL of detection solution to each well, tap gently and briefly spin down. Then incubate plates at RT for 1 hour in the dark. The plates were then read by a Chemiluminescence plate reader, Molecular Devices SpectraMax® M5, and output relative light units (RLU) data were analyzed using GraphPad Prism™

### In Vivo Studies

[0219] Animals. All animal procedures were approved by Institutional Animal Care and Use Committee (IACUC) at the University of California San Francisco and were conducted in accordance with the National Institutes of Health Guide for the Care and Use of laboratory Animals. C57BL/6NHsd (Envigo RMS, LLC) male littermates at 8-10 weeks of age, weighing ˜20-28 grams, were used in all the studies described. The mice were housed in a room that was temperature (22-25 C) and light controlled (12-h: 12-h light/dark cycle starting at 7 AM. The mice were fed with chow diet with 9% fat (PicoLab mouse Diet 20 (#5058), Lab Supply, Fortworth Texas, USA) for the duration of housing at the UCSF animal care facility.

[0220] Monoclonal Antibodies and Reagents. Anti-GLP-1 monoclonal antibodies (mAb) in PBS buffer were tested in these studies an agonist mAb, GLP1R-59-2 and one antagonist mAb, GLP1R-3. Mice were dosed prior to a Glucose Tolerance Test (GTT) or an Insulin Tolerance test (ITT) using the following regimen: Agonist GLP1R-59-2 mAb was dosed at 5 or 10 mg/kg at three different administration regimen groups prior to performing a GTT and with four different administration regimen groups in an Insulin Tolerance test (ITT). 1. mAb administered as a single dose, 15 hours prior to GTT and 21 hours prior to ITT. 2. mAb administered as a double dose, 15 hours prior to GTT and 21 hours prior to ITT plus a second mAb dose 2 hours prior to GTT and ITT. 3. mAb single dose 2 hours prior to GTT and ITT. 4. mAb single dose 6 hours prior to ITT only.

[0221] Antagonist GLP1R-3 mAb was dosed at 20 mg/kg at four different administration regimen groups. 1. mAb administered as a single dose, 15 hours prior to GTT and 21 hours prior to ITT. 2. mAb administered as a double dose, 15 hours prior to GTT and 21 hours prior to ITT plus a second mAb dose 2 hours prior to GTT and ITT. 3. mAb as a single dose 6 hours prior to GTT and ITT. 4. mAb single dose 2 hours prior to GTT and ITT.

[0222] Extendin 9-39 Peptide (MedChemExpress, Cat. No.: HY-P0264) were dosed at 1.0 or 0.23 mg/kg at three different administration regimen groups. 1. Extendin administered as a single dose, 21 hours prior to ITT. 2. Extendin administered as a double dose, 21 hours prior to ITT plus a second Extendin dose 2 hours prior to ITT. 3. mAb as a single dose 6 hours prior to ITT.

### Glucose Tolerance Test

[0223] A Glucose Tolerance Test (GTT) was used to assess two different anti-GLP1 mAbs (Agonist and Antagonist) effect on glucose tolerance following an acute glucose administration. Intraperitoneal Glucose Tolerance Test (IP-GTT) was conducted in 8 or 10-week old male mice to assess glucose disposal after a glucose injection and measuring blood glucose level after mice were fasted overnight (14-16 hours). To avoid circadian variations in mouse blood glucose levels this testing was performed at fixed times. Mice were weighed after the overnight fast and baseline blood glucose levels (pre-glucose injection; Time 0 minutes) were measured. Mice were injected, i.p., with a single bolus (10 ul/gram body weight) of 30% Dextrose solution (Hospira, Illinois) and blood glucose levels were measured at 15, 30, 60, 120 and 180-minutes post glucose administration. Blood samples were obtained by a tail nick and blood glucose levels were monitored using a OneTouch Ultra 2 glucose monitor (LifeScan, Inc.)

### Insulin Tolerance Test

[0224] An Insulin Tolerance Test (ITT) was conducted to assess two different anti-GLP1 mAbs (agonist and antagonist) effect on insulin sensitivity following acute insulin administration. 8 or 10-week old male mice were fasted for 6 hours and body weight was recorded before and after fasting. To avoid circadian variations in mouse blood glucose levels this testing was performed at fixed times. Blood samples were collected by tail nick and baseline glucose was measured prior to insulin injection. Mice were injected, i.p., with a single bolus (0.75 U/Kg body weight) of human insulin (Novolin, Novo Nordisk) and blood glucose levels were measured at 15, 30, 45, 60 and 120 minutes after insulin injection. Blood glucose levels were monitored using a OneTouch Ultra 2 glucose monitor (LifeScan, Inc.).

### ELISA for Pharmacokinetic (PK) Studies.

[0225] The rat PK study was done at Charles River Laboratories, One Innovation Dr, 3 Biotech, Worcester, MA 01605. 5 Male Sprague-Dawley rats per group were allowed to acclimate after receiving at test facility for a minimum of 3 days before dosing. GLP1R-3 and GLP1R59-2 were dosed at 10 mg/kg by IV in 100 mM Hepes, 100 mM NaCl, 50 mM NaAc, pH 6.0 vehicle. Serial blood samples were collected via jugular vein cannula with ˜250 ul volume at each time point: pre-dose, 0.0833, 0.25, 0.5, 1, 2, 4, 8, 24, 48, 72, 96, 168, 240 and 336 hours post dose. Blood samples were collected into K2EDTA tubes and stored on wet ice until processed to plasma by centrifugation (3500 rpm for 10 minutes at 5° C.) within 30 minutes of collection. Plasma samples were then transferred into an appropriate tube containing DPP-4 (3.3 μL for 100 μL of plasma) and frozen on dry ice. To measure the human IgG in rat plasma samples, sheep anti-Human IgG (1 mg/mL) was used as coating reagent) (The binding site, Lot No. AU003.M), and goat anti-Human IgG, HRP (H&L) (1 mg/mL) was used as detection reagent) (Bethyl, cat #A80-319P) in an ELISA assay. Stock solutions of human IgG standards and QCs were prepared by spiking human IgG into rat plasma. A minimum of two wells were used to analyze each study samples, QC's, standards, and blank. A 4-parameter logistic (4PL) model was used to fit the sigmoid calibration curve. The semi-logarithmic sigmoid calibration curve was obtained by plotting the absorbance response against concentration. Concentrations of analyte in the test samples were determined by computer interpolation from the plot of the calibration curve.

### Results

### Design of GPCR-Focused Antibody Library is Based on GPCR Binding Motifs and GPCR Antibodies

[0226] All known GPCR interactions, which include interactions of GPCRs with ligands, peptides, antibodies, endogenous extracellular loops and small molecules were analyzed to map the GPCR binding molecular determinants. Crystal structures of almost 150 peptides, ligand or antibodies bound to ECDs of around 50 GPCRs (gpcrdb.org) were used to identify GPCR binding motifs. Over 1000 GPCR binding motifs were extracted from this analysis. In addition, by analysis of all solved structures of GPCRs (Zhang Lab at University of Michigan), over 2000 binding motifs from endogenous extracellular loops of GPCRs were identified. Finally, by analysis of structures of over 100 small molecule ligands bound to GPCR, a reduced amino acid library of 5 amino acids (Tyr, Phe, His, Pro and Gly) that may be able to recapitulate many of the structural contacts of these ligands was identified. A sub-library with this reduced amino acid diversity was placed within a CxxxxxC motif In total, over 5000 GPCR binding motifs were identified (FIGS. 9A-9E). These binding motifs were placed in one of five different stem regions:

(SEQ ID NO: 1523)
CARDLRELECEEWTxxxxxSRGPCVDPRGVAGSFDVW,
(SEQ ID NO: 1524)
CARDMYYDFxxxxxEVVPADDAFDIW,
(SEQ ID NO: 1525)
CARDGRGSLPRPKGGPxxxxxYDSSEDSGGAFDIW,
(SEQ ID NO: 1526)
CARANQHFxxxxxGYHYYGMDVW,
(SEQ ID NO: 1527)
CAKHMSMQxxxxxRADLVGDAFDVW.

[0227] These stem regions were selected from structural antibodies with ultra-long HCDR3s. Antibody germlines were specifically chosen to tolerate these ultra-long HCDR3s. Structure and sequence analysis of human antibodies with longer than 21 amino acids revealed a V-gene bias in antibodies with long CDR3s. Finally, the germline IGHV (IGHV1-69 and IGHV3-30), IGKV (IGKV1-39 and IGKV3-15) and IGLV (IGLV1-51 and IGLV2-14) genes were chosen based on this analysis.

[0228] In addition to HCDR3 diversity, limited diversity was also introduced in the other 5 CDRs. There were 416 HCDR1 and 258 HCDR2 variants in the IGHV1-69 domain; 535 HCDR1 and 416 HCDR2 variants in the IGHV3-30 domain; 490 LCDR1, 420 LCDR2 and 824 LCDR3 variants in the IGKV1-39 domain; 490 LCDR1, 265 LCDR2 and 907 LCDR3 variants in the IGKV3-15 domain; 184 LCDR1, 151 LCDR2 and 824 LCDR3 variants in the IGLV1-51 domain; 967 LCDR1, 535 LCDR2 and 922 LCDR3 variants in the IGLV2-14 domain (FIG. 10). These CDR variants were selected by comparing the germline CDRs with the near-germline space of single, double and triple mutations observed in the CDRs within the V-gene repertoire of at least two out of 12 human donors. All CDRs have were pre-screened to remove manufacturability liabilities, cryptic splice sites or nucleotide restriction sites. The CDRs were synthesized as an oligo pool and incorporated into the selected antibody scaffolds. The heavy chain (VH) and light chain (VL) genes were linked by (G₄S)₃ linker (SEQ ID NO: 1520). The resulting scFv (VH-linker-VL) gene pool was cloned into a phagemid display vector at the N-terminal of the M13 gene-3 minor coat protein. The final size of the GPCR library is 1×10¹⁰ in a scFv format. Next-generation sequencing (NGS) was performed on the final phage library to analyze the HCDR3 length distribution in the library for comparison with the HCDR3 length distribution in B-cell populations from three healthy adult donors. The HCDR3 sequences from the three healthy donors used were derived from a publicly available database with over 37 million B-cell receptor sequences³¹. The HCDR3 length in the GPCR library is much longer than the HCDR3 length observed in B-cell repertoire sequences. On average, the median HCDR3 length in the GPCR library (which shows a biphasic pattern of distribution) is two or three times longer (33 to 44 amino acids) than the median lengths observed in natural B-cell repertoire sequences (15 to 17 amino acids) (FIG. 11). The biphasic length distribution of HCDR3 in the GPCR library is mainly caused by the two groups of stems (8aa, 9aaxxxxx10aa, 12aa) and (14aa, 16aa xxxxx18aa, 14aa) used to present the motifs within HCDR3.

### Phage Panning Against GLP-1R Over-Expressing Cell Lines Resulted in Clonal Enrichment

[0229] A GLP-1R over-expressing CHO stable cell line was created with a FLAG tag presented on the N-terminus of the receptor in order to detect cell surface expression and an EGFP tag on the C-terminus to track total receptor expression. Flow cytometry analysis of these cells confirmed that the majority of the receptor (>80%) was expressed at the cell surface (FIG. 12A). These GLP-1R-expressing CHO cells were used for five rounds of phage panning against the GPCR-focused library. The selection scheme is outlined in FIG. 12B. The variable heavy chain (VH) from the output of each panning round was PCR amplified and sequenced by MiSeq®. As the percent unique HCDR3 decreases in each round output pool NGS sequencing, significant clonal enrichment was observed from round 1 to round 5 (FIG. 13), indicating a target specific clonal selection in the panning process. Approx. 1000 clones in total (from round 4 and round 5) were picked for single clonal NGS sequencing and ˜100 unique VH-VL pairs were selected to be reformatted and expressed as full length human IgG2 at 1 ml scale.

### IgG Binders Directed to GLP-1R Contain Either GLP-1, GLP-2 or Unique HCDR3 Motifs Identified

[0230] Purified IgG clones were tested for specific binding to GLP-1R-expressing CHO cells. A single-point flow cytometry analysis using 100 nM of IgG concentration revealed that out of 100 IgG unique clones tested, 13 IgG clones bound specifically to GLP-1R-positive cells (GFP+) and not parental CHO cells (GFP−). The binding of these 13 hits was then further evaluated by 8-point titrations of each IgG clone starting from 200 nM (30pg/mL) and the cell binding affinities were determined to be in the double-digit nM range. The average CHO parental cell background binding by all 13 IgG clones is shown as a black line and is minimal compared with specific binding to GLP-1R-expressing cells (FIG. 14). Full saturation was not observed, the plateau of the binding curve at the highest concentration, 200 nM used in the experiment. FIG. 15 shows the HCDR3 amino acid sequences of these 13 IgG clones. Six of these were found to include a GLP-1 motif, four included a GLP-2 motif, and three had unknown motif.

Eight IgGs of the 13 Binders are Negative Antagonists in GLP-1R Mediated cAMP Signaling

[0231] The 13 IgG binders were next assessed for their functional activity in the cAMP signaling pathway by using GLP-1R over-expressing CHO-K1 cells purchased from DiscoverX that are designed and validated for assessing GLP-1R-induced cAMP signaling. In the first instance, the IgG clones were tested for agonist activity as compared with the peptide agonist GLP-1 7-36 in dose titrations. While GLP-1 7-36 stimulation resulted in a cAMP signal, none was observed for the IgG clones, indicating that they are not activating. Subsequently, the panel of IgG clones were tested for antagonist activity by pre-incubating GLP-1R-expressing cells with a fixed concentration of IgG to allow binding to occur and then stimulating the cells with GLP-1 7-36 in a dose dependent manner. This allowed examination of the impact of the presence of IgG on GLP-1 7-36-induced GLP-1R cAMP signaling, thereby potentially revealing any potential competitive effects of the IgG. It was observed that the GLP-1 7-36 dose response curve shifted to the right in the presence of 8 out of the 13 IgG clones, suggesting that they act as negative antagonists of the GLP-1 7-36 response (data not shown). Similar observations were made regarding the effect of the 13 IgG clones on Exendin-4 induced GLP-1R cAMP signaling response (data not shown). The remaining five IgG clones appeared to have no significant effects on GLP-1R cAMP signaling (data not shown).

### Characterization of Mechanisms of Action of the Antagonist IgG GLP1R-3

[0232] To determine the mechanism of action of these resulting functional hits, subsequent studies focused one of the GLP-1 motif-containing IgG clones that demonstrated high binding affinity, as well as functionality: GLP1R-3. Ligand competition binding assays, the IgG effects on the GLP-1 dose response in cAMP signaling, and beta-arrestin recruitment assays were conducted, resulting in characterization of GLP1R-3 as follows:

[0233] Competition with the endogenous ligand in GLP-1R binding assays. To determine if GLP1R-3 binds to the orthosteric site on the receptor, N-terminal FLAG-tagged and C terminal GFP-tagged GLP-1R over-expressing CHO cells were incubated with a dose titration of GLP1R-3 starting at 100 nM in the presence or absence of a fixed concentration of the peptide agonist GLP-1 7-36 (1 μM). Flow cytometry analysis revealed significantly reduced binding of GLP1R-3 to GLP-1R (GFP+) in the presence of GLP-1 7-36. Whilst the presence of GLP-1 7-36 peptide does not completely ablate GLP1R-3 binding, this observation suggests that the antibody may bind to an overlapping epitope, or GLP1R-3 have stronger binding affinity for GLP-1 7-36 to compete for binding. (FIG. 16A).

[0234] GLP1R-3 antagonizes GLP-1 activated cAMP signaling. The next step was to determine if GLP1R-3 exhibits competitive antagonism for GLP-1R in a dose-dependent manner. GLP-1 7-36-induced cAMP signaling was examined in the presence of a constant concentration (100 nM) of GLP1R-3 with a dose titration of GLP-1 7-36 starting at 20 nM with a 3-fold down titration, and a clear dose-dependent inhibition of the cAMP signal was observed. The EC50 for GLP-1 7-36 peptide is 0.025 nM without presence of GLP1R-3, and 0.11 nM in the presence of 100 nM GLP1R-3 (FIG. 16B), supporting that GLP1R-3 is a competitive antagonist.

[0235] GLP1R-3 reduces f-arrestin recruitment upon GLP-1R activation. When a GPCR is activated by an agonist, β-arrestins are recruited to the GPCR from the cytosol, thereby excluding the receptor from further G protein interactions and leading to signal arrest, hence the name “arrestin”. To determine if GLP1R-3 had any effects on β-arrestin recruitment by activated GLP-1R, GLP-1R over-expressing CHO-K1 cells (DiscoverX) that are specifically designed and validated for assessing GLP-1R β-arrestin recruitment were employed in the following manner. Cells were pre-incubated with a fixed concentration of GLP1R-3 (100 nM) for 1 hr at room temperature to allow binding to occur and then stimulated with GLP-1 7-36. GLP1R-3, showed inhibition of GLP-1 7-36 peptide-induced beta arrestin recruitment to GLP-1R as evidenced by the right shift of GLP-1 7-36 dose response curve for β-arrestin recruitment (FIG. 16C). This indicated that GLP1R-3 reduces β-arrestin recruitment to GLP-1R, which is consistent with the observed reduced receptor activation. Thus, these cell-based assays indicate that GLP1R-3 is a competitive antagonist to GLP-1 7-36 for GLP-1R.

### Design and Characterization of a GLP-1R Agonist IgG GLP1R-59-2

[0236] Since none of the 13 IgG hits showed any agonist activity, a GLP-1R agonist antibody (GLP1R-59-2) by linking the native GLP-1 7-36 peptide to the light chain N-terminal of a functionally inactive but GLP-1R-specific binder GLP1R-2 (FIG. 17) was engineered. GLP-1R binding assays, cAMP assays, and β-arrestin recruitment assays were conducted, resulting in characterization of GLP1R-59-2 as described here:

[0237] GLP1R-59-2 specifically binds to GLP-1R-expressing CHO cells. Flow cytometry analysis revealed that GLP1R-59-2 bound specifically to GLP-1R-positive cells (GFP+) and not parental CHO cells (GFP-), specific binding was also confirmed by GLP1R-59-2 dose titrations producing an apparent binding EC₅₀ of 15.5 nM (FIG. 18A).

[0238] GLP1R-59-2 induces a GLP-1R cAMP response similar to GLP-1 7-36. GLP1R-59-2 was tested for agonist activity as compared with GLP-1 7-36 for stimulating GLP-1R over-expressing CHO-K1 cells (DiscoverX) with separate dose titration analyses conducted for both ligand and antibody. It was found that both induced similar cAMP signaling profile and their dose response curves had almost overlapping EC₅₀ values, 0.042 nM for GLP1R-59-2 and 0.085 nM for GLP-1 7-36. (FIG. 18B) supporting the hypothesis that GLP1R-59-2 can act as an effective agonist for GLP-1R.

[0239] GLP1R-59-2 is less efficacious for β-arrestin recruitment to GLP-1R than GLP-1 7-36. To determine if GLP1R-59-2 was able to induce a similar level of β-arrestin recruitment to GLP-1R as GLP-1 7-36, GLP-1R over-expressing CHO-K1 cells (DiscoverX) were stimulated with dose titrations of each. It was found that less β-arrestin recruitment occurred with GLP1R-59-2 stimulation than with GLP-1 7-36 stimulation (FIG. 18C). Whilst GLP1R-59-2 is less efficacious than GLP-1 7-36 for the maximal β-arrestin recruitment, it would appear that the agonist IgG is slightly more potent with an ECso of 0.042 nM, and 0.085 nM for GLP-1 7-36, respectively.

### In Vivo PK and PD Testing of GLP1R-3 and GLP1R-59-2

[0240] Endogenous GLP-1 peptide has a very short serum half-life of only a few minutes, however GLP-1R antibodies can have significantly longer half-lives. This can be a considerable advantage over the current GLP-1 peptide analog therapeutics. An in vivo PK rat study was performed to evaluate the half-life of the antagonist GLP1R-3 and agonist GLP1R-59-2 in IgG format. In a 2-week PK study, GLP1R-3 exhibited an antibody-like in vivo half-life of ˜1-week in rats, while the agonist GLP-1 peptide-antibody fusion, GLP1R-59-2 exhibited>2-day half-life in rats (FIGS. 19A-19B). Liraglutide, the approved GLP-1R agonist for the treatment of Type II diabetes has a 13-hour half-life.

[0241] Agonist GLP1R-59-2 was tested for its in vivo pharmacodynamic (PD) effects in Glucose tolerance test (GTT) using wild-type C57BL/6NHsd mouse model, in comparison with the vehicle control. Agonist mAb GLP1R-59-2 treatment, either dose (5 mg/kg and 10 mg/kg) or dosing regimen (2 hrs, 13+2 hrs, and 15 hrs before glucose challenge), significantly stabilized blood glucose even after a glucose challenge (FIG. 20A). Compared to control mice, GLP1R-59-2 treatments are all significant (p<0.001) at reducing Area Under the Curve (AUC) in an GTT (FIG. 20B). However, there is no significant difference between each individual treatment timing or dose.

[0242] Antagonist, GLP1R-3 mAb and GLP-1 peptide Exendin 9-39 treatment, with 19+2 hours dosing regimen before insulin challenge, significantly stabilizes a higher blood glucose in wild-type C57BL/6NHsd mice (FIG. 21A). Compared to control mice, GLP1R-3 mAb (20 mg/kg) and Exendin (1 mg/kg) treatments are both significant (p<0.0001) at stabilizing Area Under the Curve (AUC) in an ITT (FIG. 21B). However, there is no significant difference between GLP1R-3 and Control vs. Exendin (0.23 mg/kg) with 19+2 hour treatment.

[0243] Another experiment using a single 6 hour dosing regimen, antagonist, GLP1R-3 mAb treatment also significantly stabilizes a higher blood glucose after an insulin challenge compared to GLP-1 peptide Exendin 9-39 (1.0 or 0.23 mg/kg dose) or control (FIG. 22A). Compared to control mice, GLP1R-3 mAb (20 mg/kg) treatment at 6 hours significantly (p<0.05) stabilizes Area Under the Curve (AUC) in an ITT. However, there is no significant difference between Control vs. Exendin (1.0 and 0.23 mg/kg) with the single 6 hour treatment (FIG. 22B).

[0244] GLP1R-3 mAb treatment was also compared to a comparator antibody GLP1R-226-1 and GLP1R-226-2. GLP1R-3 mAb treatment in a single 6 hour dosing regimen significantly stabilized a higher blood glucose after an insulin challenge (at time 0) compared to GLP1R-226-1 (20 mg/kg) or control (FIGS. 23A-23B). Compared to control mice, GLP1R-3 mAb (20 mg/kg) treatment at 6 hours, significantly (p<0.05) stabilized Area Under the Curve (AUC) in an ITT. There was no significant difference (p<0.05) between control vs. GLP1R-226-1 or GLP1R-226-2 with a single 6 hour treatment.

### Example 5: GLP1R Variants

[0245] GLP1R-3 was optimized to generate additional GLP1R variants.

[0246] The panning strategy for GLP1R-221 and GLP1R-222 variants is seen in FIGS. 24A-24B. 768 clones from Round 4 and Round 5 were picked and sequenced on Miseq®. 95 unique clones were reformatted. Data for GLP1R-221 and GLP1R-222 variants is seen in Tables 6A-6H. Sequences for the GLP1R-221 and GLP1R-222 variants are seen in Tables 9-13.

TABLE 6A

| IgG | MFI Ratio | Subtraction |
|---|---|---|
| GLP1R-3 | 993.31197 | 232201 |
| GLP1R- | 914.54027 | 272235 |
| 221-065 | | |
| GLP1R- | 1174.8495 | 241813 |
| 221-075 | | |
| GLP1R- | 1484.8457 | 240383 |
| 221-017 | | |
| GLP1R- | 1015.9153 | 239520 |
| 221-033 | | |
| GLP1R- | 746.61867 | 235615.5 |
| 221-076 | | |
| GLP1R- | 711.73926 | 231701 |
| 221-092 | | |
| GLP1R- | 711.15764 | 222989.5 |
| 221-034 | | |
| GLP1R- | 927.53542 | 222368.5 |
| 221-066 | | |
| GLP1R- | 1067.8986 | 220848 |
| 221-084 | | |
| GLP1R- | 1119.868 | 220417 |
| 221-009 | | |

TABLE 6B

| IgG | MFI Ratio | Subtraction |
|---|---|---|
| GLP1R-3 | 740.2 | 223614 |
| GLP1R-222- | 13.70825851 | 350309.5 |
| 052 | | |
| GLP1R-222- | 773.9745223 | 242714 |
| 016 | | |
| GLP1R-222- | 777.8080645 | 240810.5 |
| 023 | | |
| GLP1R-222- | 794.2474916 | 237181 |
| 014 | | |
| GLP1R-222- | 525.349537 | 226519 |
| 090 | | |
| GLP1R-222- | 983.9519651 | 225096 |
| 073 | | |
| GLP1R-222- | 774.5748709 | 224723.5 |
| 012 | | |
| GLP1R-222- | 711.0952381 | 223680 |
| 082 | | |
| GLP1R-222- | 850.1807692 | 220787 |
| 081 | | |
| GLP1R-222- | 946.2456522 | 217406.5 |
| 056 | | |

TABLE 6C

| | Median | Median | |
|---|---|---|---|
| | RL1-H of | RL1-H of | |
| | Expressing | Parent | MFI |
| Sample | Singlets | Singlets | Ratio |
| GLP1R221-017 | 240545 | 162 | 1484.8 |
| GLP1R221-075 | 242019 | 206 | 1174.8 |
| GLP1R221-009 | 220614 | 197 | 1119.9 |
| GLP1R221-084 | 221055 | 207 | 1067.9 |
| GLP1R221-044 | 217533.5 | 209 | 1040.8 |
| GLP1R221-033 | 239756 | 236 | 1015.9 |
| GLP1R01-3 | 232435 | 234 | 993.3 |
| GLP1R221-014 | 200638 | 203 | 988.4 |
| GLP1R221-083 | 212185 | 215 | 986.9 |
| GLP1R221-043 | 195703 | 201 | 973.6 |
| GLP1R221-082 | 195548 | 202 | 968.1 |
| GLP1R221-018 | 160183 | 167 | 959.2 |
| GLP1R221-001 | 200655 | 213 | 942.0 |
| GLP1R221-066 | 222608.5 | 240 | 927.5 |
| GLP1R221-065 | 272533 | 298 | 914.5 |
| GLP1R221-051 | 212862.5 | 234 | 909.7 |
| GLP1R221-003 | 203683.5 | 226 | 901.3 |
| GLP1R221-019 | 197108 | 224 | 879.9 |
| GLP1R221-088 | 197424 | 225.5 | 875.5 |
| GLP1R221-020 | 175621 | 205 | 856.7 |
| GLP1R221-021 | 163480.5 | 192 | 851.5 |
| GLP1R221-077 | 197424 | 236 | 836.5 |
| GLP1R221-069 | 191848 | 230 | 834.1 |
| GLP1R221-002 | 181529 | 219 | 828.9 |
| GLP1R221-040 | 208274 | 251.5 | 828.1 |
| GLP1R221-027 | 197258.5 | 241 | 818.5 |
| GLP1R221-094 | 203152 | 253 | 803.0 |
| GLP1R221-042 | 214005.5 | 268 | 798.5 |
| GLP1R221-022 | 199293 | 252 | 790.8 |
| GLP1R221-012 | 217522 | 283 | 768.6 |
| GLP1R221-031 | 168691 | 221 | 763.3 |
| GLP1R221-079 | 195512.5 | 257 | 760.7 |
| GLP1R221-059 | 194935.5 | 257 | 758.5 |
| GLP1R221-086 | 173390.5 | 229.5 | 755.5 |
| GLP1R221-076 | 235931.5 | 316 | 746.6 |
| GLP1R221-016 | 162165.5 | 220.5 | 735.4 |
| GLP1R221-054 | 163917 | 224 | 731.8 |
| GLP1R221-036 | 191269 | 264 | 724.5 |
| GLP1R221-072 | 218347 | 303 | 720.6 |
| GLP1R221-038 | 178492 | 248 | 719.7 |
| GLP1R221-092 | 232027 | 326 | 711.7 |
| GLP1R221-034 | 223303.5 | 314 | 711.2 |
| GLP1R221-058 | 168846 | 240 | 703.5 |
| GLP1R221-057 | 185403 | 268.5 | 690.5 |
| GLP1R221-090 | 183560 | 268 | 684.9 |
| GLP1R221-063 | 184038 | 274 | 671.7 |
| GLP1R221-029 | 197088 | 305 | 646.2 |
| GLP1R221-013 | 171640 | 266 | 645.3 |
| GLP1R221-030 | 160279 | 251 | 638.6 |
| GLP1R221-011 | 175641 | 283 | 620.6 |
| GLP1R221-060 | 178266.5 | 290 | 614.7 |
| GLP1R221-039 | 132161.5 | 219 | 603.5 |
| GLP1R221-015 | 176341.5 | 293 | 601.8 |
| GLP1R221-091 | 174624 | 295 | 591.9 |
| GLP1R221-074 | 173151 | 295.5 | 586.0 |
| GLP1R221-035 | 184526 | 315 | 585.8 |
| GLP1R221-041 | 101875 | 174 | 585.5 |
| GLP1R221-028 | 158490.5 | 271.5 | 583.8 |
| GLP1R221-046 | 137324.5 | 236 | 581.9 |
| GLP1R221-052 | 205979 | 370 | 556.7 |
| GLP1R221-073 | 102371 | 205 | 499.4 |
| GLP1R221-053 | 146049.5 | 301.5 | 484.4 |
| GLP1R221-056 | 197814 | 409 | 483.7 |
| GLP1R221-005 | 105542 | 226.5 | 466.0 |
| GLP1R221-087 | 178772 | 389 | 459.6 |
| GLP1R221-089 | 148048 | 325 | 455.5 |
| GLP1R221-071 | 138673 | 313 | 443.0 |
| GLP1R221-025 | 100871 | 233 | 432.9 |
| GLP1R221-032 | 172291 | 399 | 431.8 |
| GLP1R221-055 | 137657 | 329 | 418.4 |
| GLP1R221-010 | 107233 | 285 | 376.3 |
| GLP1R221-078 | 108233.5 | 301.5 | 359.0 |
| GLP1R221-024 | 79574 | 225 | 353.7 |
| GLP1R221-050 | 65939 | 204 | 323.2 |
| GLP1R221-008 | 74751.5 | 239 | 312.8 |
| GLP1R221-007 | 94850 | 358 | 264.9 |
| GLP1R221-062 | 59544 | 279 | 213.4 |
| GLP1R221-093 | 94190 | 444 | 212.1 |
| GLP1R221-068 | 56581 | 298 | 189.9 |
| GLP1R221-067 | 54810 | 300 | 182.7 |
| GLP1R221-085 | 201695 | 1352.5 | 149.1 |
| GLP1R221-064 | 42803 | 308 | 139.0 |
| GLP1R221-023 | 155330 | 1174 | 132.3 |
| GLP1R221-080 | 196473 | 1547 | 127.0 |
| GLP1R221-061 | 47559 | 482 | 98.7 |
| GLP1R221-070 | 21104.5 | 224 | 94.2 |
| GLP1R221-006 | 17593.5 | 286 | 61.5 |
| GLP1R221-045 | 603.5 | 174 | 3.5 |
| GLP1R221-004 | 519 | 164 | 3.2 |
| GLP1R221-047 | 397 | 167 | 2.4 |
| GLP1R221-048 | 214 | 142.5 | 1.5 |
| Stained Control | 145 | 142 | 1.0 |

TABLE 6D

| | Median | Median | |
|---|---|---|---|
| | RL1-H of | RL1-H of | |
| | Expressing | Parent | MFI |
| Sample | Singlets | Singlets | Ratio |
| GLP1R222-005 | 203990 | 173 | 1179.1 |
| GLP1R222-058 | 217592 | 186 | 1169.8 |
| GLP1R222-004 | 201104 | 189 | 1064.0 |
| GLP1R222-035 | 180903 | 172 | 1051.8 |
| GLP1R222-069 | 193190 | 187 | 1033.1 |
| GLP1R222-001 | 195159 | 193 | 1011.2 |
| GLP1R222-077 | 207327.5 | 208 | 996.8 |
| GLP1R222-072 | 196881.5 | 198.5 | 991.8 |
| GLP1R222-062 | 207390 | 209.5 | 989.9 |
| GLP1R222-073 | 225325 | 229 | 984.0 |
| GLP1R222-009 | 173411 | 176.5 | 982.5 |
| GLP1R222-064 | 207016 | 218 | 949.6 |
| GLP1R222-056 | 217636.5 | 230 | 946.2 |
| GLP1R222-089 | 196242 | 213 | 921.3 |
| GLP1R222-055 | 190727 | 209 | 912.6 |
| GLP1R222-046 | 204177 | 225.5 | 905.4 |
| GLP1R222-008 | 210228 | 234 | 898.4 |
| GLP1R222-078 | 176537.5 | 198 | 891.6 |
| GLP1R222-092 | 212558 | 240.5 | 883.8 |
| GLP1R222-007 | 211051 | 239 | 883.1 |
| GLP1R222-010 | 171471 | 195 | 879.3 |
| GLP1R222-081 | 221047 | 260 | 850.2 |
| GLP1R222-006 | 191343 | 227 | 842.9 |
| GLP1R222-066 | 189419 | 227 | 834.4 |
| GLP1R222-079 | 170284 | 206 | 826.6 |
| GLP1R222-042 | 214181 | 261 | 820.6 |
| GLP1R222-036 | 172934 | 214.5 | 806.2 |
| GLP1R222-014 | 237480 | 299 | 794.2 |
| GLP1R222-087 | 200143 | 252 | 794.2 |
| GLP1R222-086 | 181615.5 | 230 | 789.6 |
| GLP1R222-033 | 181334 | 230 | 788.4 |
| GLP1R222-074 | 205325 | 261 | 786.7 |
| GLP1R222-070 | 166040 | 212 | 783.2 |
| GLP1R222-002 | 192431 | 246 | 782.2 |
| GLP1R222-023 | 241120.5 | 310 | 777.8 |
| GLP1R222-012 | 225014 | 290.5 | 774.6 |
| GLP1R222-016 | 243028 | 314 | 774.0 |
| GLP1R222-063 | 214679.5 | 278 | 772.2 |
| GLP1R222-011 | 185538 | 242 | 766.7 |
| GLP1R222-028 | 182568 | 242 | 754.4 |
| GLP1R222-085 | 177368 | 239 | 742.1 |
| GLP1R01-3 | 223916.5 | 302.5 | 740.2 |
| GLP1R222-045 | 179811 | 246 | 730.9 |
| GLP1R222-054 | 153121 | 211 | 725.7 |
| GLP1R222-083 | 195648.5 | 274.5 | 712.7 |
| GLP1R222-082 | 223995 | 315 | 711.1 |
| GLP1R222-084 | 172287 | 247 | 697.5 |
| GLP1R222-076 | 186158 | 269 | 692.0 |
| GLP1R222-029 | 204757 | 300 | 682.5 |
| GLP1R222-060 | 113206.5 | 167 | 677.9 |
| GLP1R222-038 | 158998.5 | 236 | 673.7 |
| GLP1R222-026 | 154255.5 | 229 | 673.6 |
| GLP1R222-071 | 193867 | 288 | 673.1 |
| GLP1R222-053 | 131845 | 196 | 672.7 |
| GLP1R222-051 | 149756.5 | 224 | 668.6 |
| GLP1R222-093 | 152427 | 232 | 657.0 |
| GLP1R222-075 | 194948.5 | 297 | 656.4 |
| GLP1R222-065 | 184054.5 | 281 | 655.0 |
| GLP1R222-032 | 165221 | 255 | 647.9 |
| GLP1R222-059 | 142048 | 223 | 637.0 |
| GLP1R222-021 | 175543 | 278 | 631.4 |
| GLP1R222-025 | 134869 | 216 | 624.4 |
| GLP1R222-024 | 208523 | 345 | 604.4 |
| GLP1R222-022 | 200898 | 337 | 596.1 |
| GLP1R222-027 | 190430 | 326.5 | 583.2 |
| GLP1R222-015 | 187125 | 344.5 | 543.2 |
| GLP1R222-041 | 182770 | 344 | 531.3 |
| GLP1R222-090 | 226951 | 432 | 525.3 |
| GLP1R222-044 | 107845.5 | 208 | 518.5 |
| GLP1R222-040 | 167413.5 | 324 | 516.7 |
| GLP1R222-031 | 155641 | 331 | 470.2 |
| GLP1R222-088 | 170891 | 373 | 458.2 |
| GLP1R222-048 | 197618 | 441.5 | 447.6 |
| GLP1R222-018 | 126619 | 290 | 436.6 |
| GLP1R222-003 | 65950 | 155 | 425.5 |
| GLP1R222-080 | 96756.5 | 228 | 424.4 |
| GLP1R222-057 | 83288.5 | 204 | 408.3 |
| GLP1R222-047 | 118739 | 307 | 386.8 |
| GLP1R222-030 | 162896 | 506 | 321.9 |
| GLP1R222-091 | 56735.5 | 192 | 295.5 |
| GLP1R222-043 | 70814 | 406 | 174.4 |
| GLP1R222-037 | 58889 | 388 | 151.8 |
| GLP1R222-094 | 23462.5 | 176 | 133.3 |
| GLP1R222-068 | 135253 | 1167.5 | 115.8 |
| GLP1R222-019 | 39294 | 350 | 112.3 |
| GLP1R222-067 | 146186 | 1452 | 100.7 |
| GLP1R222-020 | 112537 | 1189 | 94.6 |
| GLP1R222-049 | 178616.5 | 2138.5 | 83.5 |
| GLP1R222-052 | 377875 | 27565.5 | 13.7 |
| Stained Control | 127 | 121 | 1.0 |

TABLE 6E

| | GLP1 | GLP1 | GLP1 | GLP1 | GLP1 | GLP1 | GLP1 | GLP1 | GLP1 | GLP1 | GLP1 |
|---|---|---|---|---|---|---|---|---|---|---|---|
| Sample | R221-009 | R221-017 | R221-033 | R221-034 | R221-065 | R221-066 | R221-075 | R221-076 | R221-084 | R221-092 | R01-3 |
| EC₅₀ | 12.46 | 27.65 | 9.041 | ND | ND | 57.39 | ND | ND | 4.091 | 13.29 | 11.51 |
| [nM] | | | | | | | | | | | |
| CHO | | | | | | | | | | | |
| GLP1R | | | | | | | | | | | |
| Bₘₐₓ | 215146 | 249646 | 167203 | 932518 | 797529 | 171812 | 213495 | 799149 | 286814 | 144511 | 799671 |
| CHO | | | | | | | | | | | |
| GLP1R | | | | | | | | | | | |
| EC₅₀ | ND | ND | ND | ND | ND | ND | ND | ND | ND | ND | ND |
| [nM] | | | | | | | | | | | |
| CHO | | | | | | | | | | | |
| Parent | | | | | | | | | | | |
| Bₘₐₓ | 267.4 | 228.7 | 146 | 279.8 | 261.9 | 112.1 | 234 | 183.2 | 266.6 | 291.2 | 268 |
| CHO | | | | | | | | | | | |
| Parent | | | | | | | | | | | |

TABLE 6F

| | GLP1 | GLP1 | GLP1 | GLP1 | GLP1 | GLP1 | GLP1 | GLP1 | GLP1 | GLP1 | GLP1 |
|---|---|---|---|---|---|---|---|---|---|---|---|
| Sample | R222-012 | R222-014 | R222-016 | R222-023 | R222-052 | R222-056 | R222-073 | R222-081 | R222-082 | R222-090 | R01-3 |
| EC₅₀ | 23.14 | 34.29 | 7.709 | 18.35 | 17.36 | 77.43 | 13.07 | 22.51 | 11.49 | ND | 15.4 |
| [nM] | | | | | | | | | | | |
| CHO | | | | | | | | | | | |
| GLP1R | | | | | | | | | | | |
| Bₘₐₓ | 233768 | 213081 | 129918 | 220325 | 228012 | 292619 | 150681 | 193955 | 134940 | 1078076 | 152782 |
| CHO | | | | | | | | | | | |
| GLP1R | | | | | | | | | | | |
| EC₅₀ | ND | ND | ND | 89.37 | ND | ND | ND | ND | ND | ND | ND |
| [nM] | | | | | | | | | | | |
| CHO | | | | | | | | | | | |
| Parent | | | | | | | | | | | |
| Bₘₐₓ | 340.6 | 336.4 | 218.5 | 237.9 | 47529 | 237.5 | 228.4 | 243.4 | 305 | 413.4 | 265.3 |
| CHO | | | | | | | | | | | |
| Parent | | | | | | | | | | | |

TABLE 6G

| [IgG] | GLP1 | GLP1 | GLP1 | GLP1 | GLP1 | GLP1 | GLP1 | GLP1 | GLP1 | GLP1 | GLP1 |
|---|---|---|---|---|---|---|---|---|---|---|---|
| nM | R221-009 | R221-017 | R221-033 | R221-034 | R221-065 | R221-066 | R221-075 | R221-076 | R221-084 | R221-092 | R01-3 |
| 100.00 | 1635.4 | 1844.6 | 1596.5 | 1015.0 | 1157.8 | 1056.4 | 834.9 | 1499.3 | 910.9 | 960.9 | 1193.7 |
| 33.33 | 1322.9 | 1303.9 | 1211.3 | 593.5 | 799.1 | 698.8 | 507.9 | 597.8 | 666.7 | 1019.4 | 1531.0 |
| 11.11 | 1058.6 | 707.5 | 1012.5 | 332.2 | 368.9 | 229.7 | 416.1 | 372.2 | 412.4 | 447.3 | 689.3 |
| 3.70 | 448.3 | 424.8 | 385.6 | 209.0 | 280.0 | 171.2 | 242.0 | 293.6 | 344.2 | 297.4 | 425.2 |
| 1.23 | 176.6 | 181.4 | 175.6 | 87.7 | 140.1 | 91.4 | 119.1 | 121.3 | 153.3 | 141.2 | 166.6 |
| 0.41 | 95.2 | 94.7 | 89.7 | 48.9 | 80.0 | 46.5 | 54.7 | 51.8 | 63.5 | 54.9 | 77.4 |
| 0.14 | 37.7 | 36.2 | 39.3 | 19.7 | 31.0 | 20.4 | 23.8 | 22.3 | 24.6 | 19.6 | 28.6 |
| 0.05 | 16.8 | 14.8 | 17.4 | 8.8 | 14.9 | 9.6 | 9.3 | 8.8 | 9.4 | 8.7 | 12.3 |

TABLE 6H

| [IgG] | GLP1 | GLP1 | GLP1 | GLP1 | GLP1 | GLP1 | GLP1 | GLP1 | GLP1 | GLP1 | GLP1 |
|---|---|---|---|---|---|---|---|---|---|---|---|
| nM | R222-012 | R222-014 | R222-016 | R222-023 | R222-052 | R222-056 | R222-073 | R222-081 | R222-082 | R222-090 | R01-3 |
| 100.00 | 1281.5 | 952.5 | 1049.1 | 1804.8 | 8.0 | 1522.2 | 1264.2 | 1404.0 | 845.8 | 746.6 | 1047.7 |
| 33.33 | 916.5 | 913.2 | 1412.1 | 1277.6 | 19.8 | 815.1 | 1057.9 | 1181.5 | 1027.4 | 526.8 | 1040.9 |
| 11.11 | 626.0 | 432.9 | 743.0 | 699.7 | 57.9 | 421.2 | 680.4 | 528.8 | 567.7 | 336.3 | 567.3 |
| 3.70 | 300.5 | 190.8 | 335.9 | 300.6 | 37.6 | 193.8 | 296.5 | 244.0 | 233.4 | 165.8 | 265.1 |
| 1.23 | 144.0 | 85.2 | 154.9 | 140.3 | 43.8 | 79.0 | 115.5 | 99.2 | 125.3 | 70.6 | 124.6 |
| 0.41 | 67.4 | 45.3 | 75.9 | 55.8 | 28.7 | 32.8 | 55.6 | 50.4 | 53.5 | 31.6 | 66.6 |
| 0.14 | 26.1 | 17.3 | 28.1 | 26.4 | 14.5 | 13.2 | 20.5 | 16.5 | 15.8 | 8.8 | 22.9 |
| 0.05 | 12.3 | 7.2 | 14.2 | 11.4 | 7.3 | 6.4 | 9.2 | 7.9 | 8.1 | 4.4 | 10.1 |

[0247] The GLP1R-221 and GLP1R-222 variants were assayed in competition assays. Data is seen in FIGS. 25A-25B. The variants were also assayed in a cAMP assay. Briefly, cells were pre-incubated with anti-GLP1R antibody at 100 nM followed by agonist stimulation 3× titration from 12.5 nM. Data is seen in FIG. 26 with improved variants highlighted in green.

### Example 6: Sequences

TABLE 7
Sequences of GLP1 embedded in CDRH3

| SEQ ID NO | Sequence |
|---|---|
| 1 | CAKHMSMQEGAVTGEGQAAKEFIAWLVKGRVRADLVGDAFDVW |
| 2 | CARDGRGSLPRPKGGPQTVGEGQAAKEFIAWLVKGGLTYDSSEDSGGAFDIW |
| 3 | CAKHMSMQDYLVIGEGQAAKEFIAWLVKGGPARADLVGDAFDVW |
| 4 | CAKHMSMQEGAVTGEGQDAKEFIAWLVKGRVRADLVGDAFDVW |
| 5 | WAKHMSMQEGAVTGEGQAAKEFIAWLVKGRVRADLVGDAFDVW |
| 6 | CARDGRGSLPRPKGGPQTVGEGQAAKEFIAWLVKGRVRADLVGDAFDVW |
| 7 | CARANQHFYEQEGTFTSDVSSYLEGQAAKEFIAWLVKGGIRGYHYYGMDVW |
| 8 | CARANQHFTELHGEGQAAKEFIAWLVKGRGQIDIGYHYYGMDVW |
| 9 | CARANQHFLGAGVSSYLEGQAAKEFIAWLVKGDTTGYHYYGMDVW |
| 10 | CARANQHFLDKGTFTSDVSSYLEGQAAKEFIAWLVKGIYPGYHYYGMDVW |
| 11 | CARANQHFGTLSAGEGQAAKEFIAWLVKGGSQYDSSEDSGGAFDIW |
| 12 | CARANQHFGLHAQGEGQAAKEFIAWLVKGSGTYGYHYYGMDVW |
| 13 | CARANQHFGGKGEGQAAKEFIAWLVKGGGSGAGYHYYGMDVW |
| 14 | CAKQMSMQEGAVTGEGQAAKEFIAWLVKGRVRADLVGDAFDVW |
| 15 | CAKHMSMQEGAVTGEGQAAKEFIAWLVKGGPARADLVGDAFDVW |
| 16 | CAKHMSMQEGAVTGEGQAAKEFIAWLVKGGLTYDSSEDSGGAFDIW |
| 17 | CAKHMSMQDYLVIGEGQAAKEFIAWLVKGRVRADLVGDAFDVW |

TABLE 8
GLP1R Variants CDRH3 Sequences

| | SEQ ID | |
|---|---|---|
| Variant | NO. | Sequence |
| GLP1R-1 | 18 | CARANQHFVDLYGWHGVPKGYHYYGMDVW |
| GLP1R-2 | 19 | CARDMYYDFETVVEGIQWYEALKAGKLGEVVPADDAFDIW |
| GLP1R-3 | 20 | CAKHMSMQEGAVTGEGQAAKEFIAWLVKGRVRADLVGDAFDVW |
| GLP1R-8 | 21 | CARDGRGSLPRPKGGPQTVGEGQAAKEFIAWLVKGGLTYDSSEDSGGAFDIW |
| GLP1R-10 | 22 | CARANQHFFVPGSLKVWLKGVAPESSSEYDSSEDSGGAFDIW |
| GLP1R-25 | 23 | CARANQHFLSHAGAARDFINWLIQTKITGLGSGYHYYGMDVW |
| GLP1R-26 | 24 | CAKHMSMQEGVLQGQIPSTIDWEGLLHLIRADLVGDAFDVW |
| GLP1R-30 | 25 | CARDMYYDFLKIGDNLAARDFINWLIQTKITDGTDTEVVPADDAFDIW |
| GLP1R-50 | 26 | CARDGRGSLPRPKGGPKFVPGKHETYGHKTGYRLRPGYHYYGMDVW |
| GLP1R-56 | 27 | CARANQHFFSGAEGEGQAAKEFIAWLVKGIIPGYHYYGMDVW |
| GLP1R-58 | 28 | CARANQHFGLHAQGEGQAAKEFIAWLVKGSGTYGYHYYGMDVW |
| GLP1R-60 | 29 | CAKHMSMQDYLVIGEGQAAKEFIAWLVKGGPARADLVGDAFDVW |
| GLP1R-70 | 30 | CARDGRGSLPRPKGGPPSSGRDFINWLIQTKITDGFRYDSSEDSGGAFDIW |
| GLP1R-71 | 31 | CARDLRELECEEWTRHGGKKHHGKRQSNRAHQGKHETYGHKTGSLVPSRGPCVD |
| | | PRGVAGSFDVW |
| GLP1R-72 | 32 | CARDMYYDFHPEGTFTSDVSSYLEGQAAKEFIAWLVKGSLIYEVVPADDAFDIW |
| GLP1R-80 | 33 | CARANQHFGPVAGGATPSEEPGSQLTRAELGWDAPPGQESLADELLQLGTEHGYH |
| | | YYGMDVW |
| GLP1R-83 | 34 | CAKHMSMQEGAVTGEGQAAKEFIAWLVKGRVRADLVGDAFDVW |
| GLP1R-93 | 35 | CARANQHFLSHAGAARDFINWLIQTKITGLGSGYHYYGMDVW |
| GLP1R-98 | 36 | CARDGRGSLPRPKGGPHSGRLGSGYKSYDSSEDSGGAFDIW |
| GLP1R-238 | 37 | CARANQHFSQAGRAARVPGPSSSLGPRGYHYYGMDVW |
| GLP1R-239 | 38 | CAKHMSMQSQGLDNLAARDFINWLIQTKITDGFELSRADLVGDAFDVW |
| GLP1R-240 | 39 | CARDMYYDFFGLGTFTSDVSSYLEGQAAKEFIAWLVKGVSPEVVPADDAFDIW |
| GLP1R-241 | 40 | CAKHMSMQGSVAGGTFTSDVSSYLEGQAAKEFIAWLVKGGPSFIRADLVGDAFD |
| | | VW |
| GLP1R-242 | 41 | CAKHMSMQADTGTFTSDVSSYLEGQAAKEFIAWLVKGEFSSRADLVGDAFDVW |
| GLP1R-243 | 42 | CARANQHFFGKGDNLAARDFINWLIQTKITDGSNPGYHYYGMDVW |
| GLP1R-244 | 43 | CARANQHFAATGAGEGQAAKEFIAWLVKGRVEIGYHYYGMDVW |

*bold corresponds to GLP1 or GLP2 motif

TABLE 9
Variable Heavy Chain Sequences

| | SEQ ID | |
|---|---|---|
| Variant | NO. | Variable Heavy Chain Sequence |
| GLP1R- | 44 | MEWSWVFLFFLSVTTGVHSQVQLVQSGAEVKKPGSSVKVSCKASGGSFSSHAISW |
| 238 | | VRQAPGQGLEWMGGIIPIFGAPNYAQKFQGRVTITADESTSTAYMELSSLRSEDTA |
| | | VYYCARANQHFSQAGRAARVPGPSSSLGPRGYHYYGMDVWGQGTLVTVSSASAS |
| | | TKGPSVFPLAPCSRSTSESTAALGCLVKDYFPEPVTVSWNSGALTSGVHTFPAVLQ |
| | | SSGLYSLSSVVTVPSSNFGTQTYTCNVDHKPSNTKVDKTVERKCCVECPPCPAPPV |
| | | AGPSVFLFPPKPKDTLMISRTPEVTCVVVDVSHEDPEVQFNWYVDGVEVHNAKTK |
| | | PREEQFNSTFRVVSVLTVVHQDWLNGKEYKCKVSNKGLPAPIEKTISKTKGQPREP |
| | | QVYTLPPSREEMTKNQVSLTCLVKGFYPSDIAVEWESNGQPENNYKTTPPMLDSD |
| | | GSFFLYSKLTVDKSRWQQGNVFSCSVMHEALHNHYTQKSLSLSPG |
| GLP1R- | 45 | MEWSWVFLFFLSVTTGVHSQVQLVESGGGVVQPGRSLRLSCAASGFDFSNYGMH |
| 239 | | WVRQAPGKGLEWVADISYEGSNKYYADSVKGRFTISRDNSKNTLYLQMNSLRAE |
| | | DTAVYYCAKHMSMQSQGLDNLAARDFINWLIQTKITDGFELSRADLVGDAFDVW |
| | | GQGTLVTVSSASASTKGPSVFPLAPCSRSTSESTAALGCLVKDYFPEPVTVSWNSG |
| | | ALTSGVHTFPAVLQSSGLYSLSSVVTVPSSNFGTQTYTCNVDHKPSNTKVDKTVER |
| | | KCCVECPPCPAPPVAGPSVFLFPPKPKDTLMISRTPEVTCVVVDVSHEDPEVQFNW |
| | | YVDGVEVHNAKTKPREEQFNSTFRVVSVLTVVHQDWLNGKEYKCKVSNKGLPAP |
| | | IEKTISKTKGQPREPQVYTLPPSREEMTKNQVSLTCLVKGFYPSDIAVEWESNGQPE |
| | | NNYKTTPPMLDSDGSFFLYSKLTVDKSRWQQGNVFSCSVMHEALHNHYTQKSLS |
| | | LSPG |
| GLP1R- | 46 | MEWSWVFLFFLSVTTGVHSQVQLVQSGAEVKKPGSSVKVSCKASGGTFNNYGIS |
| 240 | | WVRQAPGQGLEWMGGIIPVFGTANYAQKFQGRVTITADESTSTAYMELSSLRSED |
| | | TAVYYCARDMYYDFFGLGTFTSDVSSYLEGQAAKEFIAWLVKGVSPEVVPADDA |
| | | FDIWGQGTLVTVSSASASTKGPSVFPLAPCSRSTSESTAALGCLVKDYFPEPVTVS |
| | | WNSGALTSGVHTFPAVLQSSGLYSLSSVVTVPSSNFGTQTYTCNVDHKPSNTKVD |
| | | KTVERKCCVECPPCPAPPVAGPSVFLFPPKPKDTLMISRTPEVTCVVVDVSHEDPEV |
| | | QFNWYVDGVEVHNAKTKPREEQFNSTFRVVSVLTVVHQDWLNGKEYKCKVSNK |
| | | GLPAPIEKTISKTKGQPREPQVYTLPPSREEMTKNQVSLTCLVKGFYPSDIAVEWES |
| | | NGQPENNYKTTPPMLDSDGSFFLYSKLTVDKSRWQQGNVFSCSVMHEALHNHYT |
| | | QKSLSLSPG |
| GLP1R- | 47 | MEWSWVFLFFLSVTTGVHSQVQLVQSGAEVKKPGSSVKVSCKASGGTFSDYAIS |
| 241 | | WVRQAPGQGLEWMGGIIPIFGTTNYAQKFQGRVTITADESTSTAYMELSSLRSEDT |
| | | AVYYCAKHMSMQGSVAGGTFTSDVSSYLEGQAAKEFIAWLVKGGPSFIRADLVG |
| | | DAFDVWGQGTLVTVSSASASTKGPSVFPLAPCSRSTSESTAALGCLVKDYFPEPVT |
| | | VSWNSGALTSGVHTFPAVLQSSGLYSLSSVVTVPSSNFGTQTYTCNVDHKPSNTK |
| | | VDKTVERKCCVECPPCPAPPVAGPSVFLFPPKPKDTLMISRTPEVTCVVVDVSHED |
| | | PEVQFNWYVDGVEVHNAKTKPREEQFNSTFRVVSVLTVVHQDWLNGKEYKCKV |
| | | SNKGLPAPIEKTISKTKGQPREPQVYTLPPSREEMTKNQVSLTCLVKGFYPSDIAVE |
| | | WESNGQPENNYKTTPPMLDSDGSFFLYSKLTVDKSRWQQGNVFSCSVMHEALHN |
| | | HYTQKSLSLSPG |
| GLP1R- | 48 | MEWSWVFLFFLSVTTGVHSQVQLVQSGAEVKKPGSSVKVSCKASGGTFSSYEISW |
| 242 | | VRQAPGQGLEWMGGIIPILGIANYAQKFQGRVTITADESTSTAYMELSSLRSEDTA |
| | | VYYCAKHMSMQADTGTFTSDVSSYLEGQAAKEFIAWLVKGEFSSRADLVGDAFD |
| | | VWGQGTLVTVSSASASTKGPSVFPLAPCSRSTSESTAALGCLVKDYFPEPVTVSWN |
| | | SGALTSGVHTFPAVLQSSGLYSLSSVVTVPSSNFGTQTYTCNVDHKPSNTKVDKTV |
| | | ERKCCVECPPCPAPPVAGPSVFLFPPKPKDTLMISRTPEVTCVVVDVSHEDPEVQFN |
| | | WYVDGVEVHNAKTKPREEQFNSTFRVVSVLTVVHQDWLNGKEYKCKVSNKGLP |
| | | APIEKTISKTKGQPREPQVYTLPPSREEMTKNQVSLTCLVKGFYPSDIAVEWESNGQ |
| | | PENNYKTTPPMLDSDGSFFLYSKLTVDKSRWQQGNVFSCSVMHEALHNHYTQKS |
| | | LSLSPG |
| GLP1R- | 49 | MEWSWVFLFFLSVTTGVHSQVQLVQSGAEVKKPGSSVKVSCKASGGTFSTYGIN |
| 243 | | WVRQAPGQGLEWMGGIIPIFGTANYAQKFQGRVTITADESTSTAYMELSSLRSEDT |
| | | AVYYCARANQHFFGKGDNLAARDFINWLIQTKITDGSNPGYHYYGMDVWGQGT |
| | | LVTVSSASASTKGPSVFPLAPCSRSTSESTAALGCLVKDYFPEPVTVSWNSGALTSG |
| | | VHTFPAVLQSSGLYSLSSVVTVPSSNFGTQTYTCNVDHKPSNTKVDKTVERKCCV |
| | | ECPPCPAPPVAGPSVFLFPPKPKDTLMISRTPEVTCVVVDVSHEDPEVQFNWYVDG |
| | | VEVHNAKTKPREEQFNSTFRVVSVLTVVHQDWLNGKEYKCKVSNKGLPAPIEKTI |
| | | SKTKGQPREPQVYTLPPSREEMTKNQVSLTCLVKGFYPSDIAVEWESNGQPENNY |
| | | KTTPPMLDSDGSFFLYSKLTVDKSRWQQGNVFSCSVMHEALHNHYTQKSLSLSPG |
| GLP1R- | 50 | MEWSWVFLFFLSVTTGVHSQVQLVQSGAEVKKPGSSVKVSCKASGGTFSSYAISW |
| 244 | | VRQAPGQGLEWMGGIIPIFGTANYAQKFQGRVTITADESTSTAYMELSSLRSEDTA |
| | | VYYCARANQHFAATGAGEGQAAKEFIAWLVKGRVEIGYHYYGMDVWGQGTLVT |
| | | VSSASASTKGPSVFPLAPCSRSTSESTAALGCLVKDYFPEPVTVSWNSGALTSGVH |
| | | TFPAVLQSSGLYSLSSVVTVPSSNFGTQTYTCNVDHKPSNTKVDKTVERKCCVECP |
| | | PCPAPPVAGPSVFLFPPKPKDTLMISRTPEVTCVVVDVSHEDPEVQFNWYVDGVEV |
| | | HNAKTKPREEQFNSTFRVVSVLTVVHQDWLNGKEYKCKVSNKGLPAPIEKTISKT |
| | | KGQPREPQVYTLPPSREEMTKNQVSLTCLVKGFYPSDIAVEWESNGQPENNYKTT |
| | | PPMLDSDGSFFLYSKLTVDKSRWQQGNVFSCSVMHEALHNHYTQKSLSLSPG |
| GLP1R- | 51 | QVQLVESGGGVVQPGRSLRLSCAASGFTFSNYGMSWVRQAPGKGLEWVAVISYD |
| 59-2 | | AGNKYYADSVKGRFTISRDNSKNTLYLQMNSLRAEDTAVYYCARDMYYDFETVV |
| | | EGIQWYEALKAGKLGEVVPADDAFDIWGQGTLVTVSSASTKGPSVFPLAPCSRSTS |
| | | ESTAALGCLVKDYFPEPVTVSWNSGALTSGVHTFPAVLQSSGLYSLSSVVTVPSSN |
| | | FGTQTYTCNVDHKPSNTKVDKTVERKCCVECPPCPAPPVAGPSVFLFPPKPKDTLM |
| | | ISRTPEVTCVVVDVSHEDPEVQFNWYVDGVEVHNAKTKPREEQFNSTFRVVSVLT |
| | | VVHQDWLNGKEYKCKVSNKGLPAPIEKTISKTKGQPREPQVYTLPPSREEMTKNQ |
| | | VSLTCLVKGFYPSDIAVEWESNGQPENNYKTTPPMLDSDGSFFLYSKLTVDKSRW |
| | | QQGNVFSCSVMHEALHNHYTQKSLSLSPGK |
| GLP1R- | 52 | QVQLVQSGAEVKKPGSSVKVSCKASGGTFSDYAISWVRQAPGQGLEWMGGIIPIF |
| 59-241 | | GTTNYAQKFQGRVTITADESTSTAYMELSSLRSEDTAVYYCAKHMSMQGSVAGG |
| | | TFTSDVSSYLEGQAAKEFIAWLVKGGPSFIRADLVGDAFDVWGQGTLVTVSSASA |
| | | STKGPSVFPLAPCSRSTSESTAALGCLVKDYFPEPVTVSWNSGALTSGVHTFPAVL |
| | | QSSGLYSLSSVVTVPSSNFGTQTYTCNVDHKPSNTKVDKTVERKCCVECPPCPAPP |
| | | VAGPSVFLFPPKPKDTLMISRTPEVTCVVVDVSHEDPEVQFNWYVDGVEVHNAKT |
| | | KPREEQFNSTFRVVSVLTVVHQDWLNGKEYKCKVSNKGLPAPIEKTISKTKGQPRE |
| | | PQVYTLPPSREEMTKNQVSLTCLVKGFYPSDIAVEWESNGQPENNYKTTPPMLDS |
| | | DGSFFLYSKLTVDKSRWQQGNVFSCSVMHEALHNHYTQKSLSLSPG |
| GLP1R- | 53 | QVQLVQSGAEVKKPGSSVKVSCKASGGTFSTYGINWVRQAPGQGLEWMGGIIPIF |
| 59-243 | | GTANYAQKFQGRVTITADESTSTAYMELSSLRSEDTAVYYCARANQHFFGKGDNL |
| | | AARDFINWLIQTKITDGSNPGYHYYGMDVWGQGTLVTVSSASASTKGPSVFPLAP |
| | | CSRSTSESTAALGCLVKDYFPEPVTVSWNSGALTSGVHTFPAVLQSSGLYSLSSVV |
| | | TVPSSNFGTQTYTCNVDHKPSNTKVDKTVERKCCVECPPCPAPPVAGPSVFLFPPK |
| | | PKDTLMISRTPEVTCVVVDVSHEDPEVQFNWYVDGVEVHNAKTKPREEQFNSTFR |
| | | VVSVLTVVHQDWLNGKEYKCKVSNKGLPAPIEKTISKTKGQPREPQVYTLPPSREE |
| | | MTKNQVSLTCLVKGFYPSDIAVEWESNGQPENNYKTTPPMLDSDGSFFLYSKLTV |
| | | DKSRWQQGNVFSCSVMHEALHNHYTQKSLSLSPG |
| GLP1R-3 | 54 | QVQLVESGGGVVQPGRSLRLSCAASGFTFSSYGMHWVRQAPGKGLEWVSFISYDE |
| | | SNKYYADSVKGRFTISRDNSKNTLYLQMNSLRAEDTAVYYCAKHMSMQEGAVT |
| | | GEGQAAKEFIAWLVKGRVRADLVGDAFDVWGQGTLVTVSSASTKGPSVFPLAPC |
| | | SRSTSESTAALGCLVKDYFPEPVTVSWNSGALTSGVHTFPAVLQSSGLYSLSSVVT |
| | | VPSSNFGTQTYTCNVDHKPSNTKVDKTVERKCCVECPPCPAPPVAGPSVFLFPPKP |
| | | KDTLMISRTPEVTCVVVDVSHEDPEVQFNWYVDGVEVHNAKTKPREEQFNSTFRV |
| | | VSVLTVVHQDWLNGKEYKCKVSNKGLPAPIEKTISKTKGQPREPQVYTLPPSREE |
| | | MTKNQVSLTCLVKGFYPSDIAVEWESNGQPENNYKTTPPMLDSDGSFFLYSKLTV |
| | | DKSRWQQGNVFSCSVMHEALHNHYTQKSLSLSPGK |
| GLP1R- | 55 | MEWSWVFLFFLSVTTGVHSEVQLVESGGGLVQAGGSLRLSCAASGSIFRINAMGW |
| 43-8 | | FRQAPGKEREGVAAINNFGTTKYADSAKGRFTISADNAKNTVYLQMNSLKPEDTA |
| | | VYYCAAVRWGPHNDDRYDWGQGTQVTVSSGGGGSEPKSSDKTHTCPPCPAPELL |
| | | GGPSVFLFPPKPKDTLMISRTPEVTCVVVDVSHEDPEVKFNWYVDGVEVHNAKTK |
| | | PREEQYNSTYRVVSVLTVLHQDWLNGKEYKCKVSNKALPAPIEKTISKAKGQPRE |
| | | PQVYTLPPSREEMTKNQVSLTCLVKGFYPSDIAVEWESNGQPENNYKTTPPVLDSD |
| | | GSFFLYSKLTVDKSRWQQGNVFSCSVMHEALHNHYTQKSLSLSPG |
| GLP1R- | 56 | QVQLVESGGGVVQPGRSLRLSCAASGFTFSNYDMHWVRQAPGKGLEWVAVISYE |
| 10 | | GSDKYYADSVKGRFTISRDNSKNTLYLQMNSLRAEDTAVYYCARANQHFFVPGSL |
| | | KVWLKGVAPESSSEYDSSEDSGGAFDIWGQGTLVTVSS |
| GLP1R- | 57 | QVQLVQSGAEVKKPGSSVKVSCKASGGTRSNYAINWVRQAPGQGLEWMGGIIPIL |
| 26 | | GTADYAQKFQGRVTITADESTSTAYMELSSLRSEDTAVYYCAKHMSMQEGVLQG |
| | | QIPSTIDWEGLLHLIRADLVGDAFDVWGQGTLVTVSS |
| GLP1R- | 58 | QVQLVESGGGVVQPGRSLRLSCAASGFTFNNYAMHWVRQAPGKGLEWVAVISY |
| 221-065 | | DRSNEYYADSVKGRFTISRDNSKNTLYLQMNSLRAEDTAVYYCAKHMSMQEGAV |
| | | TGDGQAAKEFIAWLVKGRVRADLVGDAFDVWGQGTLVTVSS |
| GLP1R- | 59 | QVQLVESGGGVVQPGRSLRLSCAASGFTFSNYPMHWVRQAPGKGLEWVAVISYD |
| 221-075 | | ETNKYYADSVKGRFTISRDNSKNTLYLQMNSLRAEDTAVYYCAKHMSMQEGAVT |
| | | GEGQAAKEFIAWLVKGIVRADLVGDAFDVWGQGTLVTVSS |
| GLP1R- | 60 | QVQLVESGGGVVQPGRSLRLSCAASGFTFSDYGVHWVRQAPGKGLEWVAFISYD |
| 221-017 | | ESNKYYADSVKGRFTISRDNSKNTLYLQMNSLRAEDTAVYYCAKHMSMQEGAVT |
| | | GEYQAAKEFIAWLVKGRVRADLVGDAFDVWGQGTLVTVSS |
| GLP1R- | 61 | QVQLVESGGGVVQPGRSLRLSCAASGFSFSNYAMHWVRQAPGKGLEWVAVISHD |
| 221-033 | | RSNKYYADSVKGRFTISRDNSKNTLYLQMNSLRAEDTAVYYCAKHMSMQEGAVT |
| | | GEGQAAKDFIAWLVKGRVRADLVGDAFDVWGQGTLVTVSS |
| GLP1R- | 62 | QVQLVESGGGVVQPGRSLRLSCAASGFTFNNYPMHWVRQAPGKGLEWVAVISYD |
| 221-076 | | ETNKYYADSVKGRFTISRDNSKNTLYLQMNSLRAEDTAVYYCAKHMSMQEGAVT |
| | | GEGQAAKEFIAWLVKGIVRADLVGDAFDVWGQGTLVTVSS |
| GLP1R- | 63 | QVQLVESGGGVVQPGRSLRLSCAASGFIFNNYGMHWVRQAPGKGLEWVAFISYG |
| 221-092 | | GSNKYYADSVKGRFTISRDNSKNTLYLQMNSLRAEDTAVYYCAKHMSMQEGAV |
| | | TGEGQAVKEFIAWLVKGRVRADLVGDAFDVWGQGTLVTVSS |
| GLP1R- | 64 | QVQLVESGGGVVQPGRSLRLSCAASGFPFSNYGMHWVRQAPGKGLEWVAVISHD |
| 221-034 | | RSNKYYADSVKGRFTISRDNSKNTLYLQMNSLRAEDTAVYYCAKHMSMQEGAVT |
| | | GEGQAVKEFIAWLVKGRVRADLVGDAFDVWGQGTLVTVSS |
| GLP1R- | 65 | QVQLVESGGGVVQPGRSLRLSCAASGFTFNNYAMHWVRQAPGKGLEWVAVISY |
| 221-066 | | DRSNEYYADSVKGRFTISRDNSKNTLYLQMNSLRAEDTAVYYCAKHMSMQEGAV |
| | | TGEGQAIKEFIAWLVKGRVRADLVGDAFDVWGQGTLVTVSS |
| GLP1R- | 66 | QVQLVESGGGVVQPGRSLRLSCAASGFAFSNYGMHWVRQAPGKGLEWVAVISSD |
| 221-084 | | ENNKYYADSVKGRFTISRDNSKNTLYLQMNSLRAEDTAVYYCAKHMSMQEGAV |
| | | TGEMQAAKEFIAWLVKGRVRADLVGDAFDVWGQGTLVTVSS |
| GLP1R- | 67 | QVQLVESGGGVVQPGRSLRLSCAASGFIFSNYGMHWVRQAPGKGLEWVAVISDE |
| 221-009 | | GSNKYYADSVKGRFTISRDNSKNTLYLQMNSLRAEDTAVYYCAKHMSMQEGAV |
| | | TGAGQAAKEFIAWLVKGRVRADLVGDAFDVWGQGTLVTVSS |
| GLP1R- | 68 | QVQLVESGGGVVQPGRSLRLSCAASGFTFNNYPMHWVRQAPGKGLEWVAVISYD |
| 222-052 | | ESNKYYADSVKGRFTISRDNSKNTLYLQMNSLRAEDTAVYYCAKHMSMQEGAVT |
| | | GGGQAAKEFIAWLVKGRVRADLVGDAFDVWGQGTLVTVSS |
| GLP1R- | 69 | QVQLVESGGGVVQPGRSLRLSCAASGFTFNNYAMHWVRQAPGKGLEWVAVISDE |
| 222-016 | | GSNKYYADSVKGRFTISRDNSKNTLYLQMNSLRAEDTAVYYCAKHMSMQEGAV |
| | | TGEYQAAKEFIAWLVKGRVRADLVGDAFDVWGQGTLVTVSS |
| GLP1R- | 70 | QVQLVESGGGVVQPGRSLRLSCAASGFSFSDYGMHWVRQAPGKGLEWVAFISYD |
| 222-023 | | ANNKYYADSVKGRFTISRDNSKNTLYLQMNSLRAEDTAVYYCAKHMSMQEGAV |
| | | TGEWQAAKEFIAWLVKGRVRADLVGDAFDVWGQGTLVTVSS |
| GLP1R- | 71 | QVQLVESGGGVVQPGRSLRLSCAASGFAFSNYGMHWVRQAPGKGLEWVSFISYD |
| 222-014 | | ESNKYYADSVKGRFTISRDNSKNTLYLQMNNLRAEDTAVYYCAKHMSMQEGAV |
| | | TGEWQAAKEFIAWLVKGRVRADLVGDAFDVWGQGTLVTVSS |
| GLP1R- | 72 | QVQLVESGGGVVQPGRSLRLSCAASGFSFSDYGIHWVRQAPGKGLEWVALISYEG |
| 222-090 | | SNKYYADSVKGRFTISRDNSKNTLYLQMNSLRAEDTAVYYCAKHMSMQEGAVT |
| | | GEKQAAKEFIAWLVKGRVRADLVGDAFDVWGQGTLVTVSS |
| GLP1R- | 73 | QVQLVESGGGVVQPGRSLRLSCAASGFTFRDYGMHWVRQAPGKGLEWVAFIRYD |
| 222-073 | | EINKYYADSVKGRFTISRDNSKNTLYLQMNSLRAEDTAVYYCAKHMSMQEGAVT |
| | | GEGQAAKEFIAWLVGGRVRADLVGDAFDVWGQGTLVTVSS |
| GLP1R- | 74 | QVQLVESGGGVVQPGRSLRLSCAASGFTFNNYGMHWVRQAPGKGLEWVAVISDE |
| 222-012 | | GSNKYYADSVKGRFTISRDNSKNTLYLQMNSLRAEDTAVYYCAKHMSMQEGAV |
| | | TGVGQAAKEFIAWLVKGRVRADLVGDAFDVWGQGTLVTVSS |
| GLP1R- | 75 | QVQLVESGGGVVQPGRSLRLSCAASGFTFSAYSMHWVRQAPGKGLEWVALISYD |
| 222-082 | | ATNKYYADSVKGRFTISRDNSKNTLYLQMNSLRAEDTAVYYCAKHMSMQEGAV |
| | | TGEFQAAKEFIAWLVKGRVRADLVGDAFDVWGQGTLVTVSS |
| GLP1R- | 76 | QVQLVESGGGVVQPGRSLRLSCAASGFTFDNYALHWVRQAPGKGLEWVALISYD |
| 222-081 | | AGNKYYADSVKGRFTISRDNSKNTLYLQMNSLRAEDTAVYYCAKHMSMQEGAV |
| | | TGEGQAAKEFIAWLVKGFVRADLVGDAFDVWGQGTLVTVSS |
| GLP1R- | 77 | QVQLVESGGGVVQPGRSLRLSCAASGFPFSSYAMHWVRQAPGKGLEWVAVISYD |
| 222-056 | | RSNKYYADSVKGRFTISRDNSKNTLYLQMNSLRAEDTAVYYCAKHMSMQEGAVT |
| | | GYGQAAKEFIAWLVKGFVRADLVGDAFDVWGQGTLVTVSS |

TABLE 10
Variable Light Chain Sequences

| | SEQ ID | |
|---|---|---|
| Variant | NO. | Variable Light Chain Sequence |
| GLP1R- | 78 | MSVPTQVLGLLLLWLTDARCQSVLTQPPSVSAAPGQKVTISCSGSTSNIANNYVSW |
| 238 | | YQQLPGTAPKLLIYANNRRPSGIPDRFSGSKSGTSATLGITGLQTGDEADYYCGAW |
| | | DVRLDVGVFGGGTKLTVLGQPKAAPSVTLFPPSSEELQANKATLVCLISDFYPGAV |
| | | TVAWKADSSPVKAGVETTTPSKQSNNKYAASSYLS |
| GLP1R- | 79 | MSVPTQVLGLLLLWLTDARCQSVLTQPPSVSAAPGQKVTISCSGSTSNIEKNYVSW |
| 239 | | YQQLPGTAPKLLIYGNDQRPSGIPDRFSGSKSGTSATLGITGLQTGDEADYYCGTW |
| | | ENRLSAVVFGGGTKLTVLGQPKAAPSVTLFPPSSEELQANKATLVCLISDFYPGAV |
| | | TVAWKADSSPVKAGVETTTPSKQSNNKYAASSYLSLTPEQWKSHRSYSCQVTHEG |
| | | STVEKTVAPTECS |
| GLP1R- | 80 | MSVPTQVLGLLLLWLTDARCQSVLTQPPSVSAAPGQKVTISCSGSSSSIGNNYVSW |
| 240 | | YQQLPGTAPKLLIYANNKRPSGIPDRFSGSKSGTSATLGITGLQTGDEADYYCATW |
| | | SSSPRGWVFGGGTKLTVLGQPKAAPSVTLFPPSSEELQANKATLVCLISDFYPGAV |
| | | TVAWKADSSPVKAGVETTTPSKQSNNKYAASSYLSLTPEQWKSHRSYSCQVTHEG |
| | | STVEKTVAPTECS |
| GLP1R- | 81 | MSVPTQVLGLLLLWLTDARCQSVLTQPPSVSAAPGQKVTISCSGISSNIGNNYVSW |
| 241 | | YQQLPGTAPKLLIYDDDQRPSGIPDRFSGSKSGTSATLGITGLQTGDEADYYCGTW |
| | | DNILSAAVFGGGTKLTVLGQPKAAPSVTLFPPSSEELQANKATLVCLISDFYPGAVT |
| | | VAWKADSSPVKAGVETTTPSKQSNNKYAASSYLSLTPEQWKSHRSYSCQVTHEGS |
| | | TVEKTVAPTECS |
| GLP1R- | 82 | MSVPTQVLGLLLLWLTDARCQSVLTQPPSVSAAPGQKVTISCSGSSSNIENNDVSW |
| 242 | | YQQLPGTAPKLLIYGNDQRPSGIPDRFSGSKSGTSATLGITGLQTGDEADYYCGTW |
| | | DNTLSAGVFGGGTKLTVLGQPKAAPSVTLFPPSSEELQANKATLVCLISDFYPGAV |
| | | TVAWKADSSPVKAGVETTTPSKQSNNKYAASSYLSLTPEQWKSHRSYSCQVTHEG |
| | | STVEKTVAPTECS |
| GLP1R- | 83 | MSVPTQVLGLLLLWLTDARCQSVLTQPPSVSAAPGQKVTISCSGSRSNIGKNYVSW |
| 243 | | YQQLPGTAPKLLIYENNERPSGIPDRFSGSKSGTSATLGITGLQTGDEADYYCSSYT |
| | | TSNTQVFGGGTKLTVLGQPKAAPSVTLFPPSSEELQANKATLVCLISDFYPGAVTV |
| | | AWKADSSPVKAGVETTTPSKQSNNKYAASSYLSLTPEQWKSHRSYSCQVTHEGST |
| | | VEKTVAPTECS |
| GLP1R- | 84 | MSVPTQVLGLLLLWLTDARCQSVLTQPPSVSAAPGQKVTISCSGSSSNIGNNVVSW |
| 244 | | YQQLPGTAPKLLIYDNDKRRSGIPDRFSGSKSGTSATLGITGLQTGDEADYYCGSW |
| | | DTSLSVWVFGGGTKLTVLGQPKAAPSVTLFPPSSEELQANKATLVCLISDFYPGAV |
| | | TVAWKADSSPVKAGVETTTPSKQSNNKYAASSYLSLTPEQWKSHRSYSCQVTHEG |
| | | STVEKTVAPTECS |
| GLP1R- | 85 | HAEGTFTSDVSSYLEGQAAKEFIAWLVKGRGGGGGSGGGGSGGGGSQSVLTQPPS |
| 59-243 | | VSAAPGQKVTISCSGSRSNIGKNYVSWYQQLPGTAPKLLIYENNERPSGIPDRFSGS |
| | | KSGTSATLGITGLQTGDEADYYCSSYTTSNTQVFGGGTKLTVLGQPKAAPSVTLFP |
| | | PSSEELQANKATLVCLISDFYPGAVTVAWKADSSPVKAGVETTTPSKQSNNKYAA |
| | | SSYLSLTPEQWKSHRSYSCQVTHEGSTVEKTVAPTECS |
| GLP1R- | 86 | HAEGTFTSDVSSYLEGQAAKEFIAWLVKGRGGGGGSGGGGSGGGGSQSVLTQPPS |
| 59-241 | | VSAAPGQKVTISCSGISSNIGNNYVSWYQQLPGTAPKLLIYDDDQRPSGIPDRFSGS |
| | | KSGTSATLGITGLQTGDEADYYCGTWDNILSAAVFGGGTKLTVLGQPKAAPSVTL |
| | | FPPSSEELQANKATLVCLISDFYPGAVTVAWKADSSPVKAGVETTTPSKQSNNKYA |
| | | ASSYLSLTPEQWKSHRSYSCQVTHEGSTVEKTVAPTECS |
| GLP1R- | 87 | HGEGTFTSDVSSYLEEQAAKEFIAWLVKGGGGGGGSGGGGSGGGGSQSALTQPAS |
| 59-2 | | VSGSPGQSITISCTGTSNDIGTYNYVSWYQQHPGKAPKLMIYDVSGRPSGVSNRFS |
| | | GSKSGNTASLTISGLQAEDEADYYCSSYTTSSTEVFGGGTKLTVLGQPKAAPSVTL |
| | | FPPSSEELQANKATLVCLISDFYPGAVTVAWKADSSPVKAGVETTTPSKQSNNKYA |
| | | ASSYLSLTPEQWKSHRSYSCQVTHEGSTVEKTVAPTECS |
| GLP1R- | 88 | HAEGTFTSDVSSYLEGQAAKEFIAWLVKGRGGGGGSGGGGSGGGGSQSALTQPAS |
| 59-2A | | VSGSPGQSITISCTGTSNDIGTYNYVSWYQQHPGKAPKLMIYDVSGRPSGVSNRFS |
| | | GSKSGNTASLTISGLQAEDEADYYCSSYTTSSTEVFGGGTKLTVLGQPKAAPSVTL |
| | | FPPSSEELQANKATLVCLISDFYPGAVTVAWKADSSPVKAGVETTTPSKQSNNKYA |
| | | ASSYLSLTPEQWKSHRSYSCQVTHEGSTVEKTVAPTECS |
| GLP1R-3 | 89 | QSVLTQPPSVSAAPGQKVTISCSGSSSNIADNYVSWYQQLPGTAPKLLIYDNNKRPS |
| | | GIPDRFSGSKSGTSATLGITGLQTGDEADYYCGTWDNYLGAGVFGGGTKLTVLGQ |
| | | PKAAPSVTLFPPSSEELQANKATLVCLISDFYPGAVTVAWKADSSPVKAGVETTTP |
| | | SKQSNNKYAASSYLSLTPEQWKSHRSYSCQVTHEGSTVEKTVAPTECS |
| GLP1R- | 90 | EIVMTQSPATLSVSPGERATLSCRASHSVSSDLAWYQQKPGQAPRLLIYSASSRAT |
| 10 | | GIPARFSGSGSGTEFTLTISSLQSEDFAVYYCQQYNNWPPASTFGGGTKVEIK |
| GLP1R- | 91 | EIVMTQSPATLSVSPGERATLSCSASQSVSTKLAWYQQKPGQAPRLLIYGASTRAK |
| 26 | | GIPARFSGSGSGTEFTLTISLQSEDFAVYYCQHYHNWPLTFGGGTKVEIK |
| GLP1R- | 92 | QSVLTQPPSVSAAPGQKVTISCSGTTSNIANNFVSWYQQLPGTAPKLLIYDHNKRPS |
| 221-065 | | GIPDRFSGSKSGTSATLGITGLQTGDEADYYCGTWDTSLSAGAFGGGTKLTVL |
| GLP1R- | 93 | QSVLTQPPSVSAAPGQKVTISCSGSGSNIGNNDVSWYQQLPGTAPKLLIYDNDKRP |
| 221-075 | | AGIPDRFSGSKSGTSATLGITGLQTGDEADYYCGTWDTSLSNYVFGGGTKLTVL |
| GLP1R- | 94 | QSVLTQPPSVSAAPGQKVTISCSGSSSNIGNTYVSWYQQLPGTAPKLLIYDDYKRPS |
| 221-017 | | GIPDRFSGSKSGTSATLGITGLQTGDEADYYCATWDATLNTGVFGGGTKLTVL |
| GLP1R- | 95 | QSVLTQPPSVSAAPGQKVTISCSGSSSNIGNEYVSWYQQLPGTAPKLLIYDNNKRV |
| 221-033 | | SGIPDRFSGSKSGTSATLGITGLQTGDEADYYCATWDTSLNVGVFGGGTKLTVL |
| GLP1R- | 96 | QSVLTQPPSVSAAPGQKVTISCSGTSSNIGNNDVSWYQQLPGTAPKLLIYENNKRH |
| 221-076 | | SGIPDRFSGSKSGTSATLGITGLQTGDEADYYCLTWDHSLTAYVFGGGTKLTVL |
| GLP1R- | 97 | QSVLTQPPSVSAAPGQKVTISCSGTTSNIANNFVSWYQQLPGTAPKLLIYDNNKRPP |
| 221-092 | | GIPDRFSGSKSGTSATLGITGLQTGDEADYYCGTWDTSLSVGMFGGGTKLTVL |
| GLP1R- | 98 | QSVLTQPPSVSAAPGQKVTISCSGSSSNIGNNPVSWYQQLPGTAPKLLIYENDNRPS |
| 221-034 | | GIPDRFSGSKSGTSATLGITGLQTGDEADYYCATWDRGLSTGVFGGGTKLTVL |
| GLP1R- | 99 | QSVLTQPPSVSAAPGQKVTISCSGSSSNIGNNYLSWYQQLPGTAPKLLIYENNKRPS |
| 221-066 | | GIPDRFSGSKSGTSATLGITGLQTGDEADYYCGIWDRSLSAWVFGGGTKLTVL |
| GLP1R- | 100 | QSVLTQPPSVSAAPGQKVTISCSGSSSNIADNYVSWYQQLPGTAPKLLIYENNRRPS |
| 221-084 | | GIPDRFSGSKSGTSATLGITGLQTGDEADYYCGTWDVSLSVGMFGGGTKLTVL |
| GLP1R- | 101 | QSVLTQPPSVSAAPGQKVTISCSGSSSNIGNQYVSWYQQLPGTAPKLLIYDDHKRPS |
| 221-009 | | GIPDRFSGSKSGTSATLGITGLQTGDEADYYCGTWDTSLSVGEFGGGTKLTVL |
| GLP1R- | 102 | QSVLTQPPSVSAAPGQKVTISCSGSSSNIGKRSVSWYQQLPGTAPKLLIYDNNKRAS |
| 222-052 | | GIPDRFSGSKSGTSATLGITGLQTGDEADYYCVTWDRSLSAGVFGGGTKLTVL |
| GLP1R- | 103 | QSVLTQPPSVSAAPGQKVTISCSGSSSNIENNDVSWYQQLPGTAPKLLIYDENKRPS |
| 222-016 | | GIPDRFSGSKSGTSATLGITGLQTGDEADYYCGTWDTSLSVGMFGGGTKLTVL |
| GLP1R- | 104 | QSVLTQPPSVSAAPGQKVTISCSGSSSNIGNNDVSWYQQLPGTAPKLLIYENTKRPS |
| 222-023 | | GIPDRFSGSKSGTSATLGITGLQTGDEADYYCGTWDAGLSTGVFGGGTKLTVL |
| GLP1R- | 105 | QSVLTQPPSVSAAPGQKVTISCSGSSSNIGNHDVSWYQQLPGTAPKLLIYDNNKRH |
| 222-014 | | SGIPDRFSGSKSGTSATLGITGLQTGDEADYYCGTWDTSLSAGVFGGGTKLTVL |
| GLP1R- | 106 | QSVLTQPPSVSAAPGQKVTISCSGSSSNIADNYVSWYQQLPGTAPKLLIYDNNKRA |
| 222-090 | | SGIPDRFSGSKSGTSATLGITGLQTGDEADYYCATWDNRLSAGVFGGGTKLTVL |
| GLP1R- | 107 | QSVLTQPPSVSAAPGQKVTISCSGSGSNIGNNDVSWYQQLPGTAPKLLIYDNNKRA |
| 222-073 | | SGIPDRFSGSKSGTSATLGITGLQTGDEADYYCGTWDRGPNTGVFGGGTKLTVL |
| GLP1R- | 108 | QSVLTQPPSVSAAPGQKVTISCSGSSSNIGNNDVSWYQQLPGTAPKLLIYDDDKRPS |
| 222-012 | | GIPDRFSGSKSGTSATLGITGLQTGDEADYYCGTWDTSLSVGEFGGGTKLTVL |
| GLP1R- | 109 | QSVLTQPPSVSAAPGQKVTISCSGSSSNIGSKYVSWYQQLPGTAPKLLIYDNNKRPS |
| 222-082 | | GIPDRFSGSKSGTSATLGITGLQTGDEADYYCGTWDISPSAWVFGGGTKLTVL |
| GLP1R- | 110 | QSVLTQPPSVSAAPGQKVTISCSGSSSNIGSDYVSWYQQLPGTAPKLLIYDNNKRSS |
| 222-081 | | GIPDRFSGSKSGTSATLGITGLQTGDEADYYCGTWDESLRSWVFGGGTKLTVL |
| GLP1R- | 111 | QSVLTQPPSVSAAPGQKVTISCSGSSSNIGSNYISWYQQLPGTAPKLLIYDNDKRPA |
| 222-056 | | GIPDRFSGSKSGTSATLGITGLQTGDEADYYCGTWDTSLSVGEFGGGTKLTVL |

TABLE 11
GLP1R Sequences

| GLP1R | SEQ ID | |
|---|---|---|
| Variant | NO | Sequence |
| GLP1R-40- | 112 | EVQLVESGGGLVQPGGSLRLSCAASGFTCGDYTMGWFRQAPGKEREFLAAITSG |
| 01 | | GATTYDDNRKSRFTISADNSKNTAYLQMNSLKPEDTAVYYCWAALDGYGGRW |
| | | GQGTLVTVSS |
| GLP1R-40- | 113 | EVQLVESGGGLVQPGGSLRLSCAASGRTFRINRMGWFRQAPGKEREWVSTICSR |
| 02 | | GDTYYADSVKGRFTISADNSKNTAYLQMNSLKPEDTAVYYCAATLDGYSGSWG |
| | | QGTLVTVSS |
| GLP1R-40- | 114 | EVQLVESGGGLVQPGGSLRLSCAASGRDFRVKNMGWFRQAPGKEREFVARITW |
| 03 | | NGGSAYYADSVKGRFTISADNSKNTAYLQMNSLKPEDTAVYYCAARILSRNWG |
| | | QGTLVTVSS |
| GLP1R-40- | 115 | EVQLVESGGGLVQPGGSLRLSCAASGFTFSFYTMGWFRQAPGKEREFVAAISSGG |
| 04 | | RTSYADSVKGRFTISADNSKNTAYLQMNSLKPEDTAVYYCAAALDGYEGSWGQ |
| | | GTLVTVSS |
| GLP1R-40- | 116 | EVQLVESGGGLVQPGGSLRLSCAASGFTFSFYAMGWFRQAPGKEREFVAAISSGG |
| 05 | | RTRYADNVKGRFTISADNSKNTAYLQMNSLKPEDTAVYYCSAALDGYNGIWGQ |
| | | GTLVTVSS |
| GLP1R-40- | 117 | EVQLVESGGGLVQPGGSLRLSCAASGHTSDTYIMGWFRQAPGKEREFVSLINWSS |
| 06 | | GKTIYADSVKGRFTISADNSKNTAYLQMNSLKPEDTAVYYCAKGDYRGGYYYP |
| | | QTSQWGQGTLVTVSS |
| GLP1R-40- | 118 | EVQLVESGGGLVQPGGSLRLSCAASGFTFSSYPMGWFRQAPGKEREFVATIPSGG |
| 07 | | STYYADSVKGRFTISADNSKNTAYLQMNSLKPEDTAVYYCAAALDGYNGSWGQ |
| | | GTLVTVSS |
| GLP1R-40- | 119 | EVQLVESGGGLVQPGGSLRLSCAASGFTFGEFTMGWFRQAPGKERERVATITSGG |
| 08 | | STNYADSVKGRFTISADNSKNTAYLQMNSLKPEDTAVYYCAAVVDDYSGSWGQ |
| | | GTLVTVSS |
| GLP1R-40- | 120 | EVQLVESGGGLVQPGGSLRLSCAASGFTDGIDAMGWFRQAPGKEREVVAGIAW |
| 09 | | GDGITYYADSVKGRFTISADNSKNTAYLQMNSLKPEDTAVYYCAASYNVYYNN |
| | | WGQGTLVTVSS |
| GLP1R-40- | 121 | EVQLVESGGGLVQPGGSLRLSCAASGRTFSSGVMGWFRQAPGKEREFVAAINRS |
| 10 | | GSTFYADSVKGRFTISADNSKNTAYLQMNSLKPEDTAVYYCAKTKRTGIFTTAR |
| | | MVDWGQGTLVTVSS |
| GLP1R-40- | 122 | EVQLVESGGGLVQPGGSLRLSCAASGVTLDDYAMGWFRQAPGKEREFVAAINRS |
| 11 | | GSITYYADSVKGRFTISADNSKNTAYLQMNSLKPEDTAVYYCAAYYTDYDEALE |
| | | ETRGSYDWGQGTLVTVSS |
| GLP1R-40- | 123 | EVQLVESGGGLVQPGGSLRLSCAASGLTFGIYAMGWFRQAPGKEREFVATISRSG |
| 12 | | ASTYYADSVKGRFTISADNSKNTAYLQMNSLKPEDTAVYYCAAIVTYNDYDRGH |
| | | DWGQGTLVTVSS |
| GLP1R-40- | 124 | EVQLVESGGGLVQPGGSLRLSCAASGFTFSSDGMGWFRQAPGKERELVAAINRS |
| 13 | | GSTFYADSVKGRFTISADNSKNTAYLQMNSLKPEDTAVYYCAKTARPGIFTTAPV |
| | | EDWGQGTLVTVSS |
| GLP1R-40- | 125 | EVQLVESGGGLVQPGGSLRLSCAASGFTCGNYTMGWFRQAPGKERESVASITSG |
| 14 | | GRTNYADSVKGRFTISADNSKNTAYLQMNSLKPEDTAVYYCAATLDGYTGSWG |
| | | QGTLVTVSS |
| GLP1R-40- | 126 | EVQLVESGGGLVQPGGSLRLSCAASGFTFNYYPMGWFRQAPGKEREWVATISRG |
| 15 | | GGTYYADNVKGRFTISADNSKNTAYLQMNSLKPEDTAVYYCSAALDGYSGIWG |
| | | QGTLVTVSS |
| GLP1R-40- | 127 | EVQLVESGGGLVQPGGSLRLSCAASGIIGSFRTMGWFRQAPGKEREFVGFITGSG |
| 16 | | GTTYYADSVKGRFTISADNSKNTAYLQMNSLKPEDTAVYYCAAARRYGNLYNT |
| | | NNYDWGQGTLVTVSS |
| GLP1R-40- | 128 | EVQLVESGGGLVQPGGSLRLSCAASGITFRFKAMGWFRQAPGKEREFVAAISWR |
| 17 | | GGSTNYADSVKGRFTISADNSKNTAYLQMNSLKPEDTAVYYCAAATLGEPLVKY |
| | | TWGQGTLVTVSS |
| GLP1R-40- | 129 | EVQLVESGGGLVQPGGSLRLSCAASGSFFSINAMGWFRQAPGKEREFVAGISSKG |
| 18 | | GSSTYYADSVKGRFTISADNSKNTAYLQMNSLKPEDTAVYYCAAHRIVVGGTSV |
| | | GDWRWGQGTLVTVSS |
| GLP1R-40- | 130 | EVQLVESGGGLVQPGGSLRLSCAASGSRFSGRFNILNMGWFRQAPGKEREFVAAI |
| 19 | | SRSGDTTYYADSVKGRFTISADNSKNTAYLQMNSLKPEDTAVYYCAASLRNSGS |
| | | NVEGRWGQGTLVTVSS |
| GLP1R-40- | 131 | EVQLVESGGGLVQPGGSLRLSCAASGGTSNSYRMGWFRQAPGKEREFVAVISWT |
| 20 | | GGSTYYADSVKGRFTISADNSKNTAYLQMNSLKPEDTAVYYCAVALDGYSGSW |
| | | GQGTLVTVSS |
| GLP1R-40- | 132 | EVQLVESGGGLVQPGGSLRLSCAASGFNIGTYTMGWFRQAPGKEREFVAAIGSN |
| 21 | | GLANYADNVKGRFTISADNSKNTAYLQMNSLKPEDTAVYYCSAALDGYSGTWG |
| | | QGTLVTVSS |
| GLP1R-40- | 133 | EVQLVESGGGLVQPGGSLRLSCAASGRTFSVYAMGWFRQAPGKEREFVAGIHSD |
| 22 | | GSTLYADSVKGRFTISADNSKNTAYLQMNSLKPEDTAVYYCAAVLDGYMGTWG |
| | | QGTLVTVSS |
| GLP1R-40- | 134 | EVQLVESGGGLVQPGGSLRLSCAASGNIKSIDVMGWFRQAPGKERELVAAVRWS |
| 23 | | GGITWYADSVKGRFTISADNSKNTAYLQMNSLKPEDTAVYYCAAVVYYGDWEG |
| | | SEPVQHEYDWGQGTLVTVSS |
| GLP1R-40- | 135 | EVQLVESGGGLVQPGGSLRLSCAASGFTFSNYAMGWFRQAPGKEREFVAAIYCS |
| 24 | | DGSTQYADSVKGRFTISADNSKNTAYLQMNSLKPEDTAVYYCAEALDGYWGQG |
| | | TLVTVSS |
| GLP1R-40- | 136 | EVQLVESGGGLVQPGGSLRLSCAASGYTFRAYAMGWFRQAPGKEREMVAAMR |
| 25 | | WSGGITWYADSVKGRFTISADNSKNTAYLQMNSLKPEDTAVYYCAAQGSLYDD |
| | | YDGLPIKYDWGQGTLVTVSS |
| GLP1R-40- | 137 | EVQLVESGGGLVQPGGSLRLSCAASGLTFSSYAMGWFRQAPGKERECVTAIFSDG |
| 26 | | GTYYADNVKGRFTISADNSKNTAYLQMNSLKPEDTAVYYCAAALDGYNGYWG |
| | | QGTLVTVSS |
| GLP1R-40- | 138 | EVQLVESGGGLVQPGGSLRLSCAASGIHFAISTMGWFRQAPGKEREIVTAINWSG |
| 27 | | ARTYYADSVKGRFTISADNSKNTAYLQMNSLKPEDTAVYYCAAKFVNTDSTWS |
| | | RSEMYTWGQGTLVTVSS |
| GLP1R-40- | 139 | EVQLVESGGGLVQPGGSLRLSCAASGLTFTSYAMGWFRQAPGKEREGVAVIDSD |
| 28 | | GTTYYADSVKGRFTISADNSKNTAYLQMNSLKPEDTAVYYCAAYLDGYSGSWG |
| | | QGTLVTVSS |
| GLP1R-40- | 140 | EVQLVESGGGLVQPGGSLRLSCAASGRTFSSLPMGWFRQAPGKERELVAIRWSG |
| 29 | | GSTVYADSVKGRFTISADNSKNTAYLQMNSLKPEDTAVYYCAAIAYEEGVYRW |
| | | GQGTLVTVSS |
| GLP1R-40- | 141 | EVQLVESGGGLVQPGGSLRLSCAASGRTFSSGVMGWFRQAPGKEREFVAAINRS |
| 30 | | GSTFYADSVKGRFTISADNSKNTAYLQMNSLKPEDTAVYYCAKTKRTGIFTTWG |
| | | QGTLVTVSS |
| GLP1R-40- | 142 | EVQLVESGGGLVQPGGSLRLSCAASGFTFSSYAMGWFRQAPGKERELVAAISSGG |
| 31 | | STSYADSVKGRFTISADNSKNTAYLQMNSLKPEDTAVYYCAAAMDGYSGSWGQ |
| | | GTLVTVSS |
| GLP1R-40- | 143 | EVQLVESGGGLVQPGGSLRLSCAASGFTDGIDAMGWFRQAPGKEREYVAAISGS |
| 32 | | GSITNYADSVKGRFTISADNSKNTAYLQMNSLKPEDTAVYYCAANGIESYGWGN |
| | | RHFNWGQGTLVTVSS |
| GLP1R-40- | 144 | EVQLVESGGGLVQPGGSLRLSCAASGFTDGIDAMGWFRQAPGKEREFVAAIRWS |
| 33 | | GGITWYADSVKGRFTISADNSKNTAYLQMNSLKPEDTAVYYCAAAIFDVTDYER |
| | | ADWGQGTLVTVSS |
| GLP1R-40- | 145 | EVQLVESGGGLVQPGGSLRLSCAASGFAFSGYAMGWFRQAPGKEREFVAAISWS |
| 34 | | GGITWYADSVKGRFTISADNSKNTAYLQMNSLKPEDTAVYYCAFVTTNSDYDLG |
| | | RDWGQGTLVTVSS |
| GLP1R-40- | 146 | EVQLVESGGGLVQPGGSLRLSCAASGIPASIRTMGWFRQAPGKEREGVSWISSSD |
| 35 | | GSIYYADSVKGRFTISADNSKNTAYLQMNSLKPEDTAVYYCVAALDGYSGSWGQ |
| | | GTLVTVSS |
| GLP1R-40- | 147 | EVQLVESGGGLVQPGGSLRLSCAASGRTFSSLPMGWFRQAPGKERELVAIRWSG |
| 36 | | GSTVYADSVKGRFTISADNSKNTAYLQMNSLKPEDTAVYYCAAIAYEEGVYRW |
| | | DWGQGTLVTVSS |
| GLP1R-40- | 148 | EVQLVESGGGLVQPGGSLRLSCAASGFNSGSYTMGWFRQAPGKEREGVSWISTT |
| 37 | | DGSTYYADSVKGRFTISADNSKNTAYLQMNSLKPEDTAVYYCAAALDGYSGIW |
| | | GQGTLVTVSS |
| GLP1R-40- | 149 | EVQLVESGGGLVQPGGSLRLSCAASGFTFSVYAMGWFRQAPGKEREFVTAIDSES |
| 38 | | RTLYADSVKGRFTISADNSKNTAYLQMNSLKPEDTAVYYCAALLDGYLGTWGQ |
| | | GTLVTVSS |
| GLP1R-40- | 150 | EVQLVESGGGLVQPGGSLRLSCAASGSVFKINVMGWFRQAPGKEREFLGSILWSD |
| 39 | | DSTNYADSVKGRFTISADNSKNTAYLQMNSLKPEDTAVYYCAANLKQGSYGYRF |
| | | NDWGQGTLVTVSS |
| GLP1R-40- | 151 | EVQLVESGGGLVQPGGSLRLSCAASGTIVNIHVMGWFRQAPGKERELVAAITSGG |
| 40 | | STSYADNVKGRFTISADNSKNTAYLQMNSLKPEDTAVYYCAASAIGSGALRHFE |
| | | YDWGQGTLVTVSS |
| GLP1R-40- | 152 | EVQLVESGGGLVQPGGSLRLSCAASGRSLGTYHMGWFRQAPGKEREGVSWISSS |
| 41 | | DGSTYYADSVKGRFTISADNSKNTAYLQMNSLKPEDTAVYYCAVVLDGYSGSW |
| | | GQGTLVTVSS |
| GLP1R-40- | 153 | EVQLVESGGGLVQPGGSLRLSCAASGFTFDDTGMGWFRQAPGKEREFVAAIRWS |
| 42 | | GKETWYADSVKGRFTISADNSKNTAYLQMNSLKPEDTAVYYCAAEDPSMYYTL |
| | | EEYEYDWGQGTLVTVSS |
| GLP1R-40- | 154 | EVQLVESGGGLVQPGGSLRLSCAASGFTFSSYVMGWFRQAPGKERECVAAISSSD |
| 43 | | GRTYYADSVKGRFTISADNSKNTAYLQMNSLKPEDTAVYYCAAALDGYSGNWG |
| | | QGTLVTVSS |
| GLP1R-40- | 155 | EVQLVESGGGLVQPGGSLRLSCAASGSIFRVNVMGWFRQAPGKEREFIATIFSGG |
| 44 | | DTDYADSVKGRFTISADNSKNTAYLQMNSLKPEDTAVYYCAAIAHEEGVYRWD |
| | | WGQGTLVTVSS |
| GLP1R-40- | 156 | EVQLVESGGGLVQPGGSLRLSCAASGFTCGDYTMGWFRQAPGKEREIVASITSGG |
| 45 | | RKNYADSVKGRFTISADNSKNTAYLQMNSLKPEDTAVYYCAAALDDYSGSWGQ |
| | | GTLVTVSS |
| GLP1R-40- | 157 | EVQLVESGGGLVQPGGSLRLSCAASGHSFGNFPMGWFRQAPGKEREVIAAIDWS |
| 46 | | GGSTFYADSVKGRFTISADNSKNTAYLQMNSLKPEDTAVYYCAAAKGIGVYGW |
| | | GQGTLVTVSS |
| GLP1R-40- | 158 | EVQLVESGGGLVQPGGSLRLSCAASGSSFRFRAMGWFRQAPGKEREFVAAINRG |
| 47 | | GKISHYADSVKGRFTISADNSKNTAYLQMNSLKPEDTAVYYCAAYIRPDTYLSRD |
| | | YRKYDWGQGTLVTVSS |
| GLP1R-40- | 159 | EVQLVESGGGLVQPGGSLRLSCAASGFTWGDYTMGWFRQAPGKEREGVAAIDS |
| 48 | | DGRTRYADSVKGRFTISADNSKNTAYLQMNSLKPEDTAVYYCAAALDGYSGSW |
| | | GQGTLVTVSS |
| GLP1R-40- | 160 | EVQLVESGGGLVQPGGSLRLSCAASGNILSLNTMGWFRQAPGKEREFVAGISWS |
| 49 | | GGSTYYADSVKGRFTISADNSKNTAYLQMNSLKPEDTAVYYCAAIVTYSDYDLG |
| | | NDWGQGTLVTVSS |
| GLP1R-40- | 161 | EVQLVESGGGLVQPGGSLRLSCAASGITFRRYDMGWFRQAPGKEREGVAYISSSD |
| 50 | | GSTYYADSVKGRFTISADNSKNTAYLQMNSLKPEDTAVYYCAAVLDDYSGGWG |
| | | QGTLVTVSS |
| GLP1R-40- | 162 | EVQLVESGGGLVQPGGSLRLSCAASGLTLSNYAMGWFRQAPGKEREFVAAISRS |
| 51 | | GSSTYYADSVKGRFTISADNSKNTAYLQMNSLKPEDTAVYYCAAEMSGISGWD |
| | | WGQGTLVTVSS |
| GLP1R-40- | 163 | EVQLVESGGGLVQPGGSLRLSCAASGYTTSINTMGWFRQAPGKEREVVAAISRTG |
| 52 | | GSTYYADSVKGRFTISADNSKNTAYLQMNSLKPEDTAVYYCAASAIGSGALRRFE |
| | | YDWGQGTLVTVSS |
| GLP1R-40- | 164 | EVQLVESGGGLVQPGGSLRLSCAASGRTFSIDAMGWFRQAPGKEREFVAAIKPDG |
| 53 | | SITYYADSVKGRFTISADNSKNTAYLQMNSLKPEDTAVYYCAASASDYGLGLELF |
| | | HDEYNWGQGTLVTVSS |
| GLP1R-40- | 165 | EVQLVESGGGLVQPGGSLRLSCAASGSIFSLNAMGWFRQAPGKERELVAGISSKG |
| 54 | | GSTYYADSVKGRFTISADNSKNTAYLQMNSLKPEDTAVYYCAAFRGIMRPDWG |
| | | QGTLVTVSS |
| GLP1R-40- | 166 | EVQLVESGGGLVQPGGSLRLSCAASGFTFSSYRMGWFRQAPGKEREAVAAIASM |
| 55 | | GGLTYYADSVKGRFTISADNSKNTAYLQMNSLKPEDTAVYYCAAALDGYIGSW |
| | | GQGTLVTVSS |
| GLP1R-40- | 167 | EVQLVESGGGLVQPGGSLRLSCAASGFTFGAFTMGWFRQAPGKERERVAAITCS |
| 56 | | GSTTYADSVKGRFTISADNSKNTAYLQMNSLKPEDTAVYYCSAALDGYNGSWG |
| | | QGTLVTVSS |
| GLP1R-40- | 168 | EVQLVESGGGLVQPGGSLRLSCAASGIPSTIRAMGWFRQAPGKERESVGRIYWRD |
| 57 | | DNTYYADSVKGRFTISADNSKNTAYLQMNSLKPEDTAVYYCAAVLDGYSGSWG |
| | | QGTLVTVSS |
| GLP1R-40- | 169 | EVQLVESGGGLVQPGGSLRLSCAASGFTDGIDAMGWFRQAPGKEREVVAGIAW |
| 58 | | GDGITYYADSVKGRFTISADNSKNTAYLQMNSLKPEDTAVYYCAASYNVYYNN |
| | | YYYPISRDEYDWGQGTLVTVSS |
| GLP1R-43- | 170 | EVQLVESGGGLVQAGGSLRLSCAASGRTIVPYTMGWFRQAPGKEREVVASISWS |
| 1 | | GKSTYYADSVRGRFTISADNAKNTVYLQMNSLKPEDTAVYYCAAQRRWSQDW |
| | | GQGTQVTVSS |
| GLP1R-43- | 171 | EVQLVESGGGLVQAGGSLRLSCAASGRTFSSYAMGWFRQAPGKEREFVAAISWS |
| 2 | | GGSTYYADSVKGRFTISADNAKNTVYLQMNSLKPEDTAVYYCAAVPTGRGERD |
| | | YWGQGTQVTVSS |
| GLP1R-43- | 172 | EVQLVESGGGLVQAGGSLRLSCAASGFTFSNYAMGWFRQAPGKEREFVATITWS |
| 3 | | GSSTYYADSVKGRFTISADNAKNTVYLQMNSLKPEDTAVYYCAAVPRLYREYGY |
| | | WGQGTQVTVSS |
| GLP1R-43- | 173 | EVQLVESGGGLVQAGGSLRLSCAASGSIFHINPMGWFRQAPGKEREfVAAINIFGT |
| 4 | | TNYADSVKGRFTISADNAKNTVYLQMNSLKPEDTAVYYCAAVDGGPLWDDGY |
| | | DWGQGTQVTVSS |
| GLP1R-43- | 174 | EVQLVESGGGLVQAGGSLRLSCAASGSIFRINAMGWFRQAPGKEREGVASINIFG |
| 5 | | TTKYADSVKGRFTISADNAKNTVYLQMNSLKPEDTAVYYCSAVGWGPHNDDRY |
| | | DWGQGTQVTVSS |
| GLP1R-43- | 175 | EVQLVESGGGLVQAGGSLRLSCAASGTTFSIYAMEWFRQAPGKERELVATISRSG |
| 6 | | GTTYYADSVGGRFTISADNAKNTVYLQMNSLKPEDTAVYYCAAASWYYRDDY |
| | | WGQGTQVTVSS |
| GLP1R-43- | 176 | EVQLVESGGGLVQAGGSLRLSCAASGSIFRINAMGWFRQAPGKEREGVAAINNF |
| 7 | | GTTKYADSVKGRFTISADNAKNTVYLQMNSLKPEDTAVYYCSAVRWGPHNDDR |
| | | YDWGQGTQVTVSS |
| GLP1R-43- | 177 | EVQLVESGGGLVQAGGSLRLSCAASGSIFRINAMGWFRQAPGKEREGVAAINNF |
| 8 | | GTTKYADSAKGRFTISADNAKNTVYLQMNSLKPEDTAVYYCAAVRWGPHNDDR |
| | | YDWGQGTQVTVSS |
| GLP1R-43- | 178 | EVQLVESGGGLVQAGGSLRLSCAASGFILYGYAMGWFRQAPGKEREGVSSISPSD |
| 9 | | ASTYYADSVKGRFTISADNAKNTVYLQMNSLKPEDTAVYYCAAVLNTYSDSWG |
| | | QGTQVTVSS |
| GLP1R-43- | 179 | EVQLVESGGGLVQAGGSLRLSCAASGRTFSSYAMGWFRQAPGKEREGVTAISTS |
| 10 | | DGSTYYADSVKGRFTISADNAKNTVYLQMNSLKPEDTAVYYCAAARDGYSGSW |
| | | GQGTQVTVSS |
| GLP1R-43- | 180 | EVQLVESGGGLVQAGGSLRLSCAASGYTITNSYRMGWFRQAPGKEREFVAGITM |
| 11 | | SGFNTRYADSVKGRFTISADNAKNTVYLQMNSLKPEDTAVYYCAANRGLAGPA |
| | | WGQGTQVTVSS |
| GLP1R-43- | 181 | EVQLVESGGGLVQAGGSLRLSCAASGFTFDDNAMGWFRQAPGKEREFVSGISTS |
| 12 | | GSTTYYADSVKGRFTISADNAKNTVYLQMNSLKPEDTAVYYCAAAAGGYDYW |
| | | GQGTQVTVSS |
| GLP1R-43- | 182 | EVQLVESGGGLVQAGGSLRLSCAASGRTFSYYHMGWFRQAPGKEREGVSWISSY |
| 13 | | YSSTYYADSESGRFTISADNAKNTVYLQMNSLKPEDTAVYYCAAVLDGYSCSWG |
| | | QGTQVTVSS |
| GLP1R-43- | 183 | EVQLVESGGGLVQAGGSLRLSCAASGSPFRLYTMGWFRQAPGKEREVVAHIYSY |
| 14 | | GSINYADSVKGRFTISADNAKNTVYLQMNSLKPEDTAVYYCAAALWGHSGDWG |
| | | QGTQVTVSS |
| GLP1R-43- | 184 | EVQLVESGGGLVQAGGSLRLSCAASGSTFDTYGMGWFRQAPGKEREFVASITWS |
| 15 | | GSSTYYADSVKGRFTISADNAKNTVYLQMNSLKPEDTAVYYCAANRIHWSGFYY |
| | | WGQGTQVTVSS |
| GLP1R-43- | 185 | EVQLVESGGGLVQAGGSLRLSCAASGRTSSPYTMGWFRQAPGKEREFVSAISWS |
| 16 | | GGSTVYADSVKGRFTISADNAKNTVYLQMNSLKPEDTAVYYCALIRRAPYSRLE |
| | | TWGQGTQVTVSS |
| GLP1R-43- | 186 | EVQLVESGGGLVQAGGSLRLSCAASGSIFPINAMGWFRQAPGKEREGVAAITNFG |
| 17 | | TTKYADSVKGRFTISADNAKNTVYLQMNSLKPEDTAVYYCAAVRWGPRNDDHY |
| | | DWGQGTQVTVSS |
| GLP1R-43- | 187 | EVQLVESGGGLVQAGGSLRLSCAASGRTFDTYAMGWFRQAPGKEREFVAAITW |
| 18 | | GGGRTYYADSVKGRFTISADNAKNTVYLQMNSLKPEDTAVYYCAAVPRLYRDY |
| | | DYWGQGTQVTVSS |
| GLP1R-43- | 188 | EVQLVESGGGLVQAGGSLRLSCAASGRRFSAYGMGWFRQAPGKEREFVAAVSW |
| 19 | | DGRNTYYADSVKGRFTISADNAKNTVYLQMNSLKPEDTAVYYCASTDDYGVDW |
| | | GQGTQVTVSS |
| GLP1R-43- | 189 | EVQLVESGGGLVQAGGSLRLSCAASGSTFDNYAMGWFRQAPGKEREFVSAISGD |
| 20 | | GGTTYYADSVKGRFTISADNAKNTVYLQMNSLKPEDTAVYYCAAVPRLYRNRD |
| | | YWGQGTQVTVSS |
| GLP1R-43- | 190 | EVQLVESGGGLVQAGGSLRLSCAASGSIFRINAMGWFRQAPGKEREGVSWITSFD |
| 21 | | ASTYYADSVRGRFTISADNAKNTVYLQMNSLKPEDTAVYYCAAALDGYSGSWG |
| | | QGTQVTVSS |
| GLP1R-43- | 191 | EVQLVESGGGLVQAGGSLRLSCAASGRTFSNYAMGWFRQAPGKEREFVSTISTG |
| 22 | | GSSTYYADSVKGRFTISADNAKNTVYLQMNSLKPEDTAVYYCAAVPTGRGRRD |
| | | YWGQGTQVTVSS |
| GLP1R-43- | 192 | EVQLVESGGGLVQAGGSLRLSCAASGRTFSSYAMGWFRQAPGKEREFVAAISWS |
| 23 | | GGSTYYADSVKGRFTISADNAKNTVYLQMNSLKPEDTAVYYCAAVPVVPNTKD |
| | | YWGQGTQVTVSS |
| GLP1R-43- | 193 | EVQLVESGGGLVQAGGSLRLSCAASGNVFMIKDMGWFRQAPGKEREWVTAISW |
| 24 | | NGGSTDYADSVKGRFTISADNAKNTVYLQMNSLKPEDTAVYYCAAIVTYSDYDL |
| | | GNDWGQGTQVTVSS |
| GLP1R-43- | 194 | EVQLVESGGGLVQAGGSLRLSCAASGFPFSIWPMGWFRQAPGKEREFIATIFSGG |
| 25 | | DTDYADSVKGRFTISADNAKNTVYLQMNSLKPEDTAVYYCAAIAYEEGVYRWD |
| | | WGQGTQVTVSS |
| GLP1R-43- | 195 | EVQLVESGGGLVQAGGSLRLSCAASGRGFSRYAMGWFRQAPGKEREFVAAIRW |
| 26 | | SGKETWYADSVKGRFTISADNAKNTVYLQMNSLKPEDTAVYYCALGPVRRSRLE |
| | | WGQGTQVTVSS |
| GLP1R-43- | 196 | EVQLVESGGGLVQAGGSLRLSCAASGRTSDIYGMGWFRQAPGKEREFVARIYWS |
| 27 | | SGNTYYADSVKGRFTISADNAKNTVYLQMNSLKPEDTAVYYCAAAYRFSDYSRP |
| | | AGYDWGQGTQVTVSS |
| GLP1R-43- | 197 | EVQLVESGGGLVQAGGSLRLSCAASGNDFSFNSMGWFRQAPGKEREFLASVSWG |
| 28 | | FGSTYYADSVKGRFTISADNAKNTVYLQMNSLKPEDTAVYYCARAYGNPTWGQ |
| | | GTQVTVSS |
| GLP1R-43- | 198 | EVQLVESGGGLVQAGGSLRLSCAASGRTFTDYPMGWFRQAPGKERELESFVPIN |
| 29 | | GTSTYYADSDSGRFTISADNAKNTVYLQMNSLKPEDTAVYYCAAALDGYSCSW |
| | | GQGTQVTVSS |
| GLP1R-43- | 199 | EVQLVESGGGLVQAGGSLRLSCAASGRTFSIYAMGWFRQAPGKEREFVATISRGG |
| 30 | | STTYYADSVKGRFTISADNAKNTVYLQMNSLKPEDTAVYYCAAGPRSGKDYWG |
| | | QGTQVTVSS |
| GLP1R-43- | 200 | EVQLVESGGGLVQAGGSLRLSCAASGFIFQLYVMGWFRQAPGKEREGVTYINNI |
| 31 | | DGSTYYAYSVRGRFTISADNAKNTVYLQMNSLKPEDTAVYYCAAVRDGYSGSW |
| | | GQGTQVTVSS |
| GLP1R-43- | 201 | EVQLVESGGGLVQAGGSLRLSCAASGSTFSSYAMEWFRQAPGKERELVATISRSG |
| 32 | | GRTYYADSVKGRFTISADNAKNTVYLQMNSLKPEDTAVYYCAAANWYYRYDY |
| | | WGQGTQVTVSS |
| GLP1R-43- | 202 | EVQLVESGGGLVQAGGSLRLSCAASGFPFRINAMGWFRQAPGKERELVTAISSSG |
| 33 | | SSTYYADSVKGRFTISADNAKNTVYLQMNSLKPEDTAVYYCAASGYYATYYGE |
| | | RDYWGQGTQVTVSS |
| GLP1R-43- | 203 | EVQLVESGGGLVQAGGSLRLSCAASGFTLSSYTMGWFRQAPGKEREFVSAISRGG |
| 34 | | GNTYYADSVKGRFTISADNAKNTVYLQMNSLKPEDTAVYYCAAVPSYAEYDYW |
| | | GQGTQVTVSS |
| GLP1R-43- | 204 | EVQLVESGGGLVQAGGSLRLSCAASGRTFSIYGMGWFRQAPGKEREGVAAINGG |
| 35 | | GDSTNYADSVKGRFTISADNAKNTVYLQMNSLKPEDTAVYYCAAASASPYSGRN |
| | | YWGQGTQVTVSS |
| GLP1R-43- | 205 | EVQLVESGGGLVQAGGSLRLSCAASGLtfSTTVMGWFRQAPGKEREGDGYISITD |
| 36 | | GSTYYADSVKGRFTISADNAKNTVYLQMNSLKPEDTAVYYCSAALDGYSGSWG |
| | | QGTQVTVSS |
| GLP1R-43- | 206 | EVQLVESGGGLVQAGGSLRLSCAASGRTLENYRMGWFRQAPGKEREFVAAVSW |
| 37 | | SSGNAYYADSVKGRFTISADNAKNTVYLQMNSLKPEDTAVYYCAANWKMLLG |
| | | VENDWGQGTQVTVSS |
| GLP1R-43- | 207 | EVQLVESGGGLVQAGGSLRLSCAASGRTFSSYAMGWFRQAPGKEREFVAAISWS |
| 38 | | GGSTYYADSVKGRFTISADNAKNTVYLQMNSLKPEDTAVYYCAAVPTVYGERD |
| | | YWGQGTQVTVSS |
| GLP1R-43- | 208 | EVQLVESGGGLVQAGGSLRLSCAASGSILSISPMGWFRQAPGKERELVAINFSWG |
| 39 | | TTDYADSvKGRFTISADNAKNTVYLQMNSLKPEDTAVYYCAAIAYEQGVYRWD |
| | | WGQGTQVTVSS |
| GLP1R-43- | 209 | EVQLVESGGGLVQAGGSLRLSCAASGRTFSSYAMGWFRQAPGKEREFVAAISWS |
| 40 | | GGSTYYADSVKGRFTISADNAKNTVYLQMNSLKPEDTAVYYCAAERYRYSGYY |
| | | ARDSWGQGTQVTVSS |
| GLP1R-43- | 210 | EVQLVESGGGLVQAGGSLRLSCAASGFTLSDYAMGWFRQAPGKEREFVSAISRD |
| 41 | | GTTTYYADSVKGRFTISADNAKNTVYLQMNSLKPEDTAVYYCAAVPTSQYATD |
| | | YWGQGTQVTVSS |
| GLP1R-43- | 211 | EVQLVESGGGLVQAGGSLRLSCAASGRDLDYYVMGWFRQAPGKERELVAIKFS |
| 42 | | GGTTDYADSVKGRFTISADNAKNTVYLQMNSLKPEDTAVYYCADIAYEEGVYR |
| | | WDWGQGTQVTVSS |
| GLP1R-43- | 212 | EVQLVESGGGLVQAGGSLRLSCAASGSIFTFNAMGWFRQAPGKEREFVAGITRSA |
| 43 | | VSTSYADSVKGRFTISADNAKNTVYLQMNSLKPEDTAVYYCAAFRGIMRPDWG |
| | | QGTQVTVSS |
| GLP1R-43- | 213 | EVQLVESGGGLVQAGGSLRLSCAASGRTFDSYAMGWFRQAPGKEREFVAAITSS |
| 44 | | GGNTYYADSVKGRFTISADNAKNTVYLQMNSLKPEDTAVYYCAAVPARYGARD |
| | | YWGQGTQVTVSS |
| GLP1R-43- | 214 | EVQLVESGGGLVQAGGSLRLSCAASGRTFNNDHMGWFRQAPGKEREFVAVIEIG |
| 45 | | GATNYADSVKGRFTISADNAKNTVYLQMNSLKPEDTAVYYCATWDGRQVWGQ |
| | | GTQVTVSS |
| GLP1R-43- | 215 | EVQLVESGGGLVQAGGSLRLSCAASGGTFRKLAMGWFRQAPGKERELVAAIRW |
| 46 | | SGGITWYADSVKGRFTISADNAKNTVYLQMNSLKPEDTAVYYCAATLAKGGGR |
| | | WGQGTQVTVSS |
| GLP1R-43- | 216 | EVQLVESGGGLVQAGGSLRLSCAASGRTFSSYAMGWFRQAPGKEREFVAAISWS |
| 47 | | GGSTYYADSVKGRFTISADNAKNTVYLQMNSLKPEDTAVYYCAAVPRAPSDRD |
| | | YWGQGTQVTVSS |
| GLP1R-43- | 217 | EVQLVESGGGLVQAGGSLRLSCAASGRTFRIYAMGWFRQAPGKERELVSSISWN |
| 48 | | SGSTYYADSVKGRFTISADNAKNTVYLQMNSLKPEDTAVYYCAAAAYSYTQGTT |
| | | YESWGQGTQVTVSS |
| GLP1R-43- | 218 | EVQLVESGGGLVQAGGSLRLSCAASGRTFTSYRMGWFRQAPGKEREWMGTIDY |
| 49 | | SGRTYYADSVKGRFTISADNAKNTVYLQMNSLKPEDTAVYYCAAAMDGYSGSW |
| | | GQGTQVTVSS |
| GLP1R-43- | 219 | EVQLVESGGGLVQAGGSLRLSCAASGRTFSIYAMGWFRQAPGKEREFVAAINWN |
| 50 | | GDTTYYADSVKGRFTISADNAKNTVYLQMNSLKPEDTAVYYCAAVPRYSDYDY |
| | | WGQGTQVTVSS |
| GLP1R-43- | 220 | EVQLVESGGGLVQAGGSLRLSCAASGRFFSTRVMGWFRQAPGKERELVAIKFSG |
| 51 | | GTTDYADSVKGRFTISADNAKNTVYLQMNSLKPEDTAVYYCAAIAHEEGVYRW |
| | | DWGQGTQVTVSS |
| GLP1R-43- | 221 | EVQLVESGGGLVQAGGSLRLSCAASGRTFSSYAMGWFRQAPGKEREFVAAISWS |
| 52 | | GGSTYYADSVKGRFTISADNAKNTVYLQMNSLKPEDTAVYYCAAVPSVYGTRD |
| | | YWGQGTQVTVSS |
| GLP1R-43- | 222 | EVQLVESGGGLVQAGGSLRLSCAASGSTFSIDVMGWFRQAPGKEREGVSYISMS |
| 53 | | DGRTYYADSVKGRFTISADNAKNTVYLQMNSLKPEDTAVYYCAAELDGYSGSW |
| | | GQGTQVTVSS |
| GLP1R-43- | 223 | EVQLVESGGGLVQAGGSLRLSCAASGLSFSGYTMGWFRQAPGKEREVVAAISRT |
| 54 | | GGSTYYADSVKGRFTISADNAKNTVYLQMNSLKPEDTAVYYCALIQRRAPYSRL |
| | | ETWGQGTQVTVSS |
| GLP1R-43- | 224 | EVQLVESGGGLVQAGGSLRLSCAASGSTLSIYGMGWFRQAPGKEREGVAAISWS |
| 55 | | DGSTSYADSVKGRFTISADNAKNTVYLQMNSLKPEDTAVYYCAAVADIGLASDF |
| | | DYWGQGTQVTVSS |
| GLP1R-43- | 225 | EVQLVESGGGLVQAGGSLRLSCAASGSTFSNYAMGWFRQAPGKEREFVATITRSS |
| 56 | | GNTYYADSVKGRFTISADNAKNTVYLQMNSLKPEDTAVYYCAAVPFKPYSYDY |
| | | WGQGTQVTVSS |
| GLP1R-43- | 226 | EVQLVESGGGLVQAGGSLRLSCAASGSTFSIYTMGWFRQAPGKEREFVAAISGSS |
| 57 | | DSTYYADSVKGRFTISADNAKNTVYLQMNSLKPEDTAVYYCATVPKTRYTRDY |
| | | WGQGTQVTVSS |
| GLP1R-43- | 227 | EVQLVESGGGLVQAGGSLRLSCAASGNTFSSYAMGWFRQAPGKEREFVAIISRSG |
| 58 | | GRTYYADSVKGRFTISADNAKNTVYLQMNSLKPEDTAVYYCAAAPYNETNSWG |
| | | QGTQVTVSS |
| GLP1R-43- | 228 | EVQLVESGGGLVQAGGSLRLSCAASGSTFSTYAMGWFRQAPGKEREFVASISRSG |
| 59 | | GRTYYADSVKGRFTISADNAKNTVYLQMNSLKPEDTAVYYCAAARYNERNSWG |
| | | QGTQVTVSS |
| GLP1R-43- | 229 | EVQLVESGGGLVQAGGSLRLSCAASGGTLNNNPMAMGWFRQAPGKEREFVVAI |
| 60 | | YWSNGKTPYADSVKRRFTISADNAKNTVYLQMNSLKPEDTAVYYCAAALDGYS |
| | | GAWGQGTQVTVSS |
| GLP1R-43- | 230 | EVQLVESGGGLVQAGGSLRLSCAASGRTFSSYAMGWFRQAPGKEREFVAAISWS |
| 61 | | GGSTYYADSVKGRFTISADNAKNTVYLQMNSLKPEDTAVYYCAAVPRAPSERDY |
| | | WGQGTQVTVSS |
| GLP1R-43- | 231 | EVQLVESGGGLVQAGGSLRLSCAASGRTFNNNDMGWFRQAPGKEREFVAVIKL |
| 62 | | GGATTYDDYSEGRFTISADNAKNTVYLQMNSLKPEDTAVYYCATWDARHVWG |
| | | QGTQVTVSS |
| GLP1R-43- | 232 | EVQLVESGGGLVQAGGSLRLSCAASGRAFSYYNMGWFRQAPGKEREGVSWISSS |
| 63 | | DGSTYYADSVKGRFTISADNAKNTVYLQMNSLKPEDTAVYYCAAVLDGCSGSW |
| | | GQGTQVTVSS |
| GLP1R-43- | 233 | EVQLVESGGGLVQAGGSLRLSCAASGSTFSTYAMGWFRQAPGKEREFVAAINRS |
| 64 | | GASTYYADSVKGRFTISADNAKNTVYLQMNSLKPEDTAVYYCAAALLGGRGGC |
| | | GKGYWGQGTQVTVSS |
| GLP1R-43- | 234 | EVQLVESGGGLVQAGGSLRLSCAASGSILDTYAMGWFRQAPGKERELVSGINTS |
| 65 | | GDTTYYADSVKGRFTISADNAKNTVYLQMNSLKPEDTAVYYCAAVLAGYEYWG |
| | | QGTQVTVSS |
| GLP1R-43- | 235 | EVQLVESGGGLVQAGGSLRLSCAASGSTLSINAMGWFRQAPGKEREFVAHMSHD |
| 66 | | GTTNYADSVKGRFTISADNAKNTVYLQMNSLKPEDTAVYYCARLPNYRWGQGT |
| | | QVTVSS |
| GLP1R-43- | 236 | EVQLVESGGGLVQAGGSLRLSCAASGSIFRLNAMGWFRQAPGKEREGVAAINNF |
| 67 | | DTTKYADSSKGRFTISADNAKNTVYLQMNSLKPEDTAVYYCAAVRWGPRSDDR |
| | | WGQGTQVTVSS |
| GLP1R-43- | 237 | EVQLVESGGGLVQAGGSLRLSCAASGLTNPPFDNFPMGWFRQAPGKEREFVAVIS |
| 68 | | WTGGSTYYADSVKGRFTISADNAKNTVYLQMNSLKPEDTAVYYCPAVYPRYYG |
| | | DDDRPPVDWGQGTQVTVSS |
| GLP1R-43- | 238 | EVQLVESGGGLVQAGGSLRLSCAASGPTFSKAVMGWFRQAPGKEREFVAAMNW |
| 69 | | SGRSTYYADSVKGRFTISADNAKNTVYLQMNSLKPEDTAVYYCAATPAGRGGY |
| | | WGQGTQVTVSS |
| GLP1R-43- | 239 | EVQLVESGGGLVQAGGSLRLSCAASGSIFSDYAMGWFRQAPGKEREFVATINWG |
| 70 | | GGRTYYADSVKGRFTISADNAKNTVYLQMNSLKPEDTAVYYCAAVPKTRYARD |
| | | YWGQGTQVTVSS |
| GLP1R-43- | 240 | EVQLVESGGGLVQAGGSLRLSCAASGFILSDYAMGWFRQAPGKEREFVAAISSSE |
| 71 | | ASTYYADSVKGRFTISADNAKNTVYLQMNSLKPEDTAVYYCAAVRFWAGYDSW |
| | | GQGTQVTVSS |
| GLP1R-43- | 241 | EVQLVESGGGLVQAGGSLRLSCAASGYTDYKYDMGWFRQAPGKEREFVAAISW |
| 72 | | GGGLTVYADSVKGRFTISADNAKNTVYLQMNSLKPEDTAVYYCAAVATVTDYT |
| | | GTYSDGWGQGTQVTVSS |
| GLP1R-43- | 242 | EVQLVESGGGLVQAGGSLRLSCAASGRTFSNYAMGWFRQAPGKEREFVATINW |
| 73 | | GGGNTYYADSVKGRFTISADNAKNTVYLQMNSLKPEDTAVYYCAAVPKTRYAY |
| | | DYWGQGTQVTVSS |
| GLP1R-43- | 243 | EVQLVESGGGLVQAGGSLRLSCAASGRTFSRYYMGWFRQAPGKERELVAVILRG |
| 74 | | GSTNYADSVKGRFTISADNAKNTVYLQMNSLKPEDTAVYYCAAARRYGNLYNT |
| | | NNYDWGQGTQVTVSS |
| GLP1R-43- | 244 | EVQLVESGGGLVQAGGSLRLSCAASGSILSSYVMGWFRQAPGKEREFVSAISRSG |
| 75 | | TSTYYADSVKGRFTISADNAKNTVYLQMNSLKPEDTAVYYCAAVPKTRYDRDY |
| | | WGQGTQVTVSS |
| GLP1R-43- | 245 | EVQLVESGGGLVQAGGSLRLSCAASGFTLDNYAMGWFRQAPGKEREFVAAISWS |
| 76 | | GGSTYYADSVKGRFTISADNAKNTVYLQMNSLKPEDTAVYYCAAVPKTRYSYD |
| | | YWGQGTQVTVSS |
| GLP1R-43- | 246 | EVQLVESGGGLVQAGGSLRLSCAASGNTYSYKVMGWFRQAPGKEREFVGIIIRN |
| 77 | | GDTTYYADSVKGRFTISADNAKNTVYLQMNSLKPEDTAVYYCAASPKYMTAYE |
| | | RSYDWGQGTQVTVSS |
| GLP1R-43- | 247 | EVQLVESGGGLVQAGGSLRLSCAASGSIFRNYAMGWFRQAPGKEREFVATITTSG |
| 78 | | GNTYYADSVKGRFTISADNAKNTVYLQMNSLKPEDTAVYYCAAVPKTRYRRDY |
| | | WGQGTQVTVSS |
| GLP1R-43- | 248 | EVQLVESGGGLVQAGGSLRLSCAASGFTFGTTTMGWFRQAPGKEREVVAAITGS |
| 79 | | GRSTYYADSVKGRFTISADNAKNTVYLQMNSLKPEDTAVYYCAASAIGSGALRR |
| | | FEYDWGQGTQVTVSS |
| GLP1R-43- | 249 | EVQLVESGGGLVQAGGSLRLSCAASGGTFSAYAMGWFRQAPGKEREGVAAIRW |
| 80 | | DGGYTRYADSVKGRFTISADNAKNTVYLQMNSLKPEDTAVYYCAATTPTTSYLP |
| | | RSERQYEWGQGTQVTVSS |
| GLP1R-43- | 250 | EVQLVESGGGLVQAGGSLRLSCAASGRTFSSYAMGWFRQAPGKEREFVAAISWS |
| 81 | | GGSTYYADSVKGRFTISADNAKNTVYLQMNSLKPEDTAVYYCAAVPSVYGERD |
| | | YWGQGTQVTVSS |
| GLP1R-43- | 251 | EVQLVESGGGLVQAGGSLRLSCAASGSFFSINAMGWFRQAPGKEREFVAGISQSG |
| 82 | | GSTAYADSVKGRFTISADNAKNTVYLQMNSLKPEDTAVYYCAAHRIVVGGTSVG |
| | | DWRWGQGTQVTVSS |
| GLP1R-43- | 252 | EVQLVESGGGLVQAGGSLRLSCAASGRTFSSYRMGWFRQAPGKEREMVASITSR |
| 83 | | KIPKYADSVKGRFTISADNAKNTVYLQMNSLKPEDTAVYYCAVWSGRDWGQGT |
| | | QVTVSS |
| GLP1R-43- | 253 | EVQLVESGGGLVQAGGSLRLSCAASGFTFRRYVMGWFRQAPGKEREFVAAISRD |
| 84 | | GDRTYYADSVKGRFTISADNAKNTVYLQMNSLKPEDTAVYYCASTRLAGRWYR |
| | | DSEYKWGQGTQVTVSS |
| GLP1R-43- | 254 | EVQLVESGGGLVQAGGSLRLSCAASGRTFSDNAMGWFRQAPGKEREFVATISRG |
| 85 | | GSRTSYADSVKGRFTISADNAKNTVYLQMNSLKPEDTAVYYCAAGPRSGRDYW |
| | | GQGTQVTVSS |
| GLP1R-43- | 255 | EVQLVESGGGLVQAGGSLRLSCAASGFTFRSYAMGWFRQAPGKEREFVATITRN |
| 86 | | GDNTYYADSVKGRFTISADNAKNTVYLQMNSLKPEDTAVYYCATVGTRYNYW |
| | | GQGTQVTVSS |
| GLP1R-43- | 256 | EVQLVESGGGLVQAGGSLRLSCAASGSTFSDYVMGWFRQAPGKERELISGITWN |
| 87 | | GDTTYYADSVKGRFTISADNAKNTVYLQMNSLKPEDTAVYYCAVVRLGGYDY |
| | | WGQGTQVTVSS |
| GLP1R-43- | 257 | EVQLVESGGGLVQAGGSLRLSCAASGGIISNYHMGWFRQAPGKEREFVATITRSG |
| 88 | | GSTYYADSVKGRFTISADNAKNTVYLQMNSLKPEDTAVYYCAMAGRGRWGQG |
| | | TQVTVSS |
| GLP1R-43- | 258 | EVQLVESGGGLVQAGGSLRLSCAASGFSFDDDYVMGWFRQAPGKERELVSAIG |
| 89 | | WSGASTYYADSVKGRFTISADNAKNTVYLQMNSLKPEDTAVYYCAAYYTDYDE |
| | | ALEETRGSYDWGQGTQVTVSS |
| GLP1R-43- | 259 | EVQLVESGGGLVQAGGSLRLSCAASGSTFPIYAMGWFRQAPGKEREWVSGISSR |
| 90 | | DDTTYYADSVKGRFTISADNAKNTVYLQMNSLKPEDTAVYYCSAHRIVFRGTSV |
| | | GDWRWGQGTQVTVSS |
| GLP1R-43- | 260 | EVQLVESGGGLVQAGGSLRLSCAASGRAFSYYNMGWFRQAPGKEREGVSWISSS |
| 91 | | DGSTYYADSVKGRFTISADNAKNTVYLQMNSLKPEDTAVYYCAAVLDGYSGSW |
| | | GQGTQVTVSS |
| GLP1R-43- | 261 | EVQLVESGGGLVQAGGSLRLSCAASGSTFSIDVMGWFRQAPGKERELVAATGRR |
| 92 | | GGPTYYADSVKGRFTISADNAKNTVYLQMNSLKPEDTAVYYCAARTSYSGTYD |
| | | YGVDWGQGTQVTVSS |
| GLP1R-43- | 262 | EVQLVESGGGLVQAGGSLRLSCAASGGTFSSYAMGWFRQAPGKEREFVAAINWS |
| 93 | | GSITYYADSVKGRFTISADNAKNTVYLQMNSLKPEDTAVYYCAVGRSGRDYWG |
| | | QGTQVTVSS |
| GLP1R-43- | 263 | EVQLVESGGGLVQAGGSLRLSCAASGSIFRINAMGWFRQAPGKEREGVAAINNF |
| 94 | | GTTKYADSVKGRFTISADNAKNTVYLQMNSLKPEDTAVYYCAAVRWGPRNDDR |
| | | YDWGQGTQVTVSS |
| GLP1R-43- | 264 | EVQLVESGGGLVQAGGSLRLSCAASGGTLNNNPMAMGWFRQAPGKEREFVVAI |
| 95 | | YWSNGKTQYADSVKGRFTISADNAKNTVYLQMNSLKPEDTAVYYCAAALDGYS |
| | | GSWGQGTQVTVSS |
| GLP1R-43- | 265 | EVQLVESGGGLVQAGGSLRLSCAASGRTFNNDHMGWFRQAPGKEREFVAVIEIG |
| 96 | | GATNYADSVKGRFTISADNAKNTVYLQMNSLKPEDTAVYYCASWDGRQVWGQ |
| | | GTQVTVSS |
| GLP1R-41- | 266 | EVQLVESGGGLVQPGGSLRLSCAASGRTFAMGWMGWFRQAPGKEREFVARVS |
| 01 | | WDGRNAYYANSRFGRFTISADNSKNTAYLQMNSLKPEDTAVYYCPRYVSPARD |
| | | HGCWGQGTLVTVSS |
| GLP1R-41- | 267 | EVQLVESGGGLVQPGGSLRLSCAASGLTISTYIMGWFRQAPGKEREFVAVVNWN |
| 02 | | GDSTYYADSVKGRFTISADNSKNTAYLQMNSLKPEDTAVYYCAAYYTDYDEAL |
| | | EETRGSYDWGQGTLVTVSS |
| GLP1R-41- | 268 | EVQLVESGGGLVQPGGSLRLSCAASGTLFKINAMGWFRQAPGKERELVAAINRG |
| 03 | | GKITHYADSVKGRFTISADNSKNTAYLQMNSLKPEDTAVYYCAASLRNSGSNVE |
| | | GRWGQGTLVTVSS |
| GLP1R-41- | 269 | EVQLVESGGGLVQPGGSLRLSCAASGVTLDLYAMGWFRQAPGKEREFVAAISPS |
| 04 | | AVTTYYADSVKGRFTISADNSKNTAYLQMNSLKPEDTAVYYCAAYDYYSDYPLP |
| | | DANEYEWGQGTLVTVSS |
| GLP1R-41- | 270 | EVQLVESGGGLVQPGGSLRLSCAASGRTFSDYIMGWFRQAPGKEREFVAVINRSG |
| 05 | | STTYYADSVKGRFTISADNSKNTAYLQMNSLKPEDTAVYYCAAVQAYSNSSDYY |
| | | SQEGAYDWGQGTLVTVSS |
| GLP1R-41- | 271 | EVQLVESGGGLVQPGGSLRLSCAASGFTFSNYVMGWFRQAPGKEREGVSYISSSD |
| 06 | | GRTHYADSVKGRFTISADNSKNTAYLQMNSLKPEDTAVYYCAAVLDGYNGSWG |
| | | QGTLVTVSS |
| GLP1R-41- | 272 | EVQLVESGGGLVQPGGSLRLSCAASGFTFSRFGMGWFRQAPGKEREGVAAIGSD |
| 07 | | GSTSYADSVKGRFTISADNSKNTAYLQMNSLKPEDTAVYYCASGRDRYARDLSE |
| | | YEYVWGQGTLVTVSS |
| GLP1R-41- | 273 | EVQLVESGGGLVQPGGSLRLSCAASGFTFRFNAMGWFRQAPGKEREFVAAINWR |
| 08 | | GSHPYYADSVKGRFTISADNSKNTAYLQMNSLKPEDTAVYYCAAATLGEPLVKY |
| | | TWGQGTLVTVSS |
| GLP1R-41- | 274 | EVQLVESGGGLVQPGGSLRLSCAASGGTFGVYHMGWFRQAPGKEREFLASVTW |
| 09 | | GFGSTYYADSVKGRFTISADNSKNTAYLQMNSLKPEDTAVYYCAATTTRSYDDT |
| | | YRNSWVYNWGQGTLVTVSS |
| GLP1R-41- | 275 | EVQLVESGGGLVQPGGSLRLSCAASGFSFDDYAMGWFRQAPGKERELVAAIRWS |
| 10 | | GGITWYADSVKGRFTISADNSKNTAYLQMNSLKPEDTAVYYCAAYGSGSDYLP |
| | | MDWGQGTLVTVSS |
| GLP1R-41- | 276 | EVQLVESGGGLVQPGGSLRLSCAASGPTFTIYAMGWFRQAPGKEREFVGAISMSG |
| 11 | | EDTIYADSEKGRFTISADNSKNTAYLQMNSLKPEDTAVYYCAAVQAYTSNTNYY |
| | | NQEGAYDWGQGTLVTVSS |
| GLP1R-41- | 277 | EVQLVESGGGLVQPGGSLRLSCAASGPTFSNYYVGWFRQAPGKEREFVAAILCSG |
| 12 | | GITCYADSVKGRFTISADNSKNTAYLQMNSLKPEDTAVYYCAAALDGYIGTWGQ |
| | | GTLVTVSS |
| GLP1R-41- | 278 | EVQLVESGGGLVQPGGSLRLSCAASGGTFSSIGMGWFRQAPGKEREGVAAIGSD |
| 13 | | GSTSYADSVKGRFTISADNSKNTAYLQMNSLKPEDTAVYYCAAASDRYARVLTE |
| | | YEYVWGQGTLVTVSS |
| GLP1R-41- | 279 | EVQLVESGGGLVQPGGSLRLSCAASGVTFNNYGMGWFRQAPGKERELVAAIRW |
| 14 | | SGSATFYADSVKGRFTISADNSKNTAYLQMNSLKPEDTAVYYCAADDGARGSW |
| | | GQGTLVTVSS |
| GLP1R-41- | 280 | EVQLVESGGGLVQPGGSLRLSCAASGRTFTMDGMGWFRQAPGKEREGVAAIGS |
| 15 | | DGSTSYADSVKGRFTISADNSKNTAYLQMNSLKPEDTAVYYCAAGSNIGGSRWR |
| | | YDWGQGTLVTVSS |
| GLP1R-41- | 281 | EVQLVESGGGLVQPGGSLRLSCAASGGIFRFNAMGWFRQAPGKERELVAAISPAA |
| 16 | | LTTYYADSVKGRFTISADNSKNTAYLQMNSLKPEDTAVYYCAAYLPSPYYSSYY |
| | | DSTKYEWGQGTLVTVSS |
| GLP1R-41- | 282 | EVQLVESGGGLVQPGGSLRLSCAASGSGFSPNVMGWFRQAPGKEREVVAAISWN |
| 17 | | GGSTYYADSVKGRFTISADNSKNTAYLQMNSLKPEDTAVYYCAASAIGSGALRR |
| | | FEYDWGQGTLVTVSS |
| GLP1R-41- | 283 | EVQLVESGGGLVQPGGSLRLSCAASGFTFGFYAMGWFRQAPGKERELVAAISWS |
| 18 | | DASTYYADSVKGRFTISADNSKNTAYLQMNSLKPEDTAVYYCALDNRRSYVDY |
| | | YNVSEYDWGQGTLVTVSS |
| GLP1R-41- | 284 | EVQLVESGGGLVQPGGSLRLSCAASGFTFSIYPMGWFRQAPGKERECVSTIWSRG |
| 19 | | DTYYADNVKGRFTISADNSKNTAYLQMNSLKPEDTAVYYCAAALDGYSATWGQ |
| | | GTLVTVSS |
| GLP1R-41- | 285 | EVQLVESGGGLVQPGGSLRLSCAASGFTFDYYAMGWFRQAPGKERELVAAISWS |
| 20 | | NDITYYADSVKGRFTISADNSKNTAYLQMNSLKPEDTAVYYCALDNRRSYVDYY |
| | | SVSEYDWGQGTLVTVSS |
| GLP1R-41- | 286 | EVQLVESGGGLVQPGGSLRLSCAASGGTFSTYTMGWFRQAPGKEREFVAGIYND |
| 21 | | GTASYYADSVKGRFTISADNSKNTAYLQMNSLKPEDTAVYYCAAFDGYTGNDW |
| | | GQGTLVTVSS |
| GLP1R-41- | 287 | EVQLVESGGGLVQPGGSLRLSCAASGVTLDLYAMGWFRQAPGKEREWVARMY |
| 22 | | LDGDYPYYADSVKGRFTISADNSKNTAYLQMNSLKPEDTAVYYCAAVLDGYSG |
| | | SWGQGTLVTVSS |
| GLP1R-41- | 288 | EVQLVESGGGLVQPGGSLRLSCAASGRTISRYIMGWFRQAPGKERELVAAINRSG |
| 23 | | KSTYYADSVKGRFTISADNSKNTAYLQMNSLKPEDTAVYYCASTRFAGRWYRDS |
| | | EYKWGQGTLVTVSS |
| GLP1R-41- | 289 | EVQLVESGGGLVQPGGSLRLSCAASGRTLSVYAMGWFRQAPGKEREFVAAVRW |
| 24 | | SGGITWYVDSVKGRFTISADNSKNTAYLQMNSLKPEDTAVYYCAAFDGYSGSD |
| | | WGQGTLVTVSS |
| GLP1R-41- | 290 | EVQLVESGGGLVQPGGSLRLSCAASGSIFSITEMGWFRQAPGKERELVAAIAVGG |
| 25 | | GITWYADSVKGRFTISADNSKNTAYLQMNSLKPEDTAVYYCAAHDVDDDESPY |
| | | YSGGYYRALYDWGQGTLVTVSS |
| GLP1R-41- | 291 | EVQLVESGGGLVQPGGSLRLSCAASGSIYSLDAMGWFRQAPGKERELVAAISPAA |
| 26 | | LTTYYADSVKGRFTISADNSKNTAYLQMNSLKPEDTAVYYCAASMSLRPLDPAS |
| | | YSPDIQPYDWGQGTLVTVSS |
| GLP1R-41- | 292 | EVQLVESGGGLVQPGGSLRLSCAASGFTCGDYTMGWFRQAPGKERESVAAIDSD |
| 27 | | GRTHYADSVISRFTISADNSKNTAYLQMNSLKPEDTAVYYCAAALDGYSGDWGQ |
| | | GTLVTVSS |
| GLP1R-41- | 293 | EVQLVESGGGLVQPGGSLRLSCAASGRTLSfYAMGWFRQAPGKEREFVAAINRG |
| 28 | | GRISHYADSVKGRFTISADNSKNTAYLQMNSLKPEDTAVYYCAAGRRYGSPPHD |
| | | GSSYEWGQGTLVTVSS |
| GLP1R-41- | 294 | EVQLVESGGGLVQPGGSLRLSCAASGFTFDDYAMGWFRQAPGKEREFVAGISWT |
| 29 | | GGITYYADSVKGRFTISADNSKNTAYLQMNSLKPEDTAVYYCAVNVGFEWGQG |
| | | TLVTVSS |
| GLP1R-41- | 295 | EVQLVESGGGLVQPGGSLRLSCAASGFTFDDYGMGWFRQAPGKEREGVAAIGSD |
| 30 | | GSTSYADSVKGRFTISADNSKNTAYLQMNSLKPEDTAVYYCAATLRATITNFDEY |
| | | VWGQGTLVTVSS |
| GLP1R-41- | 296 | EVQLVESGGGLVQPGGSLRLSCAASGRTFNRYPMGWFRQAPGKEREFVAHMSH |
| 31 | | DGTTNYADSVKGRFTISADNSKNTAYLQMNSLKPEDTAVYYCAAPGTRYYGSN |
| | | QVNYNWGQGTLVTVSS |
| GLP1R-41- | 297 | EVQLVESGGGLVQPGGSLRLSCAASGSIFSFNAMGWFRQAPGKEREFVAGITRRG |
| 32 | | LSTSYADSVKGRFTISADNSKNTAYLQMNSLKPEDTAVYYCAAAKGIGVYGWG |
| | | QGTLVTVSS |
| GLP1R-41- | 298 | EVQLVESGGGLVQPGGSLRLSCAASGGSISSINAMGWFRQAPGKERELVAGIITSG |
| 33 | | DSTYYADSVKGRFTISADNSKNTAYLQMNSLKPEDTAVYYCAAGSAYVAGVRR |
| | | RNAYHWGQGTLVTVSS |
| GLP1R-41- | 299 | EVQLVESGGGLVQPGGSLRLSCAASGGTFSADVMGWFRQAPGKEREFVAAISTG |
| 34 | | SITIYADSVKGRFTISADNSKNTAYLQMNSLKPEDTAVYYCATYGYDSGLYFITDS |
| | | NDYEWGQGTLVTVSS |
| GLP1R-41- | 300 | EVQLVESGGGLVQPGGSLRLSCAASGFTFDDAAMGWFRQAPGKEREFVAAMRW |
| 35 | | RGGITWYADSVKGRFTISADNSKNTAYLQMNSLKPEDTAVYYCAAQGTLYDDY |
| | | DGLPIKYDWGQGTLVTVSS |
| GLP1R-41- | 301 | EVQLVESGGGLVQPGGSLRLSCAASGDIFNINAMGWFRQAPGKEREPVAAISPAA |
| 36 | | LTTYYADSVKGRFTISADNSKNTAYLQMNSLKPEDTAVYYCAATPIERLGLDAYE |
| | | YDWGQGTLVTVSS |
| GLP1R-41- | 302 | EVQLVESGGGLVQPGGSLRLSCAASGRTFSTYNMGWFRQAPGKEREFVAAINWS |
| 37 | | GGITWYADSVKGRFTISADNSKNTAYLQMNSLKPEDTAVYYCAAEPPDSSWYLD |
| | | GSPEFFKWGQGTLVTVSS |
| GLP1R-41- | 303 | EVQLVESGGGLVQPGGSLRLSCAASGSISVFDAMGWFRQAPGKERELVAGISGSG |
| 38 | | GDTYYADSVKGRFTISADNSKNTAYLQMNSLKPEDTAVYYCAASPKYSTHSIFD |
| | | ASPYNWGQGTLVTVSS |
| GLP1R-41- | 304 | EVQLVESGGGLVQPGGSLRLSCAASGFTSDDYAMGWFRQAPGKEREFVAALRW |
| 39 | | SSSNIDYTYYADSVKGRFTISADNSKNTAYLQMNSLKPEDTAVYYCATDLSGHG |
| | | DVSEYEYDWGQGTLVTVSS |
| GLP1R-41- | 305 | EVQLVESGGGLVQPGGSLRLSCAASGFTFSPNVMGWFRQAPGKEREFVAAITSSG |
| 40 | | ETTWYADSVKGRFTISADNSKNTAYLQMNSLKPEDTAVYYCAAEPYGSGSSLMS |
| | | EYDWGQGTLVTVSS |
| GLP1R-41- | 306 | EVQLVESGGGLVQPGGSLRLSCAASGRNLRMYRMGWFRQAPGKEREFVAAINW |
| 41 | | SGDNTHYADSVKGRFTISADNSKNTAYLQMNSLKPEDTAVYYCAANWKMLLGV |
| | | ENDWGQGTLVTVSS |
| GLP1R-41- | 307 | EVQLVESGGGLVQPGGSLRLSCAASGDTFNCYAMGWFRQAPGKEREFVAVINW |
| 42 | | SGDNTHYADSVKGRFTISADNSKNTAYLQMNSLKPEDTAVYYCAAYYTDYDEA |
| | | LEETRGRYDWGQGTLVTVSS |
| GLP1R-41- | 308 | EVQLVESGGGLVQPGGSLRLSCAASGSISTINVMGWFRQAPGKEREFVAAISPSA |
| 43 | | VTTYYADSVKGRFTISADNSKNTAYLQMNSLKPEDTAVYYCATDLSGRGDVSEY |
| | | EYDWGQGTLVTVSS |
| GLP1R-41- | 309 | EVQLVESGGGLVQPGGSLRLSCAASGRTLSKYRMGWFRQAPGKEREFVAAIRWS |
| 44 | | GGITWYADSVKGRFTISADNSKNTAYLQMNSLKPEDTAVYYCAIPHGIAGRITWG |
| | | QGTLVTVSS |
| GLP1R-41- | 310 | EVQLVESGGGLVQPGGSLRLSCAASGFTFGSYAMGWFRQAPGKERELVAGIDQS |
| 45 | | GGITWYADSVKGRFTISADNSKNTAYLQMNSLKPEDTAVYYCAADDYLGGDNW |
| | | YLGPYDWGQGTLVTVSS |
| GLP1R-41- | 311 | EVQLVESGGGLVQPGGSLRLSCAASGFTIDDYAMGWFRQAPGKEREFVAAVSGT |
| 46 | | GTIAYYADSVKGRFTISADNSKNTAYLQMNSLKPEDTAVYYCAAYYIDYDEALE |
| | | ETRGSYDWGQGTLVTVSS |
| GLP1R-41- | 312 | EVQLVESGGGLVQPGGSLRLSCAASGRTFNNYVMGWFRQAPGKERELVAGITSG |
| 47 | | RDITYYADSVKGRFTISADNSKNTAYLQMNSLKPEDTAVYYCAADGVLATTLNW |
| | | DWGQGTLVTVSS |
| GLP1R-41- | 313 | EVQLVESGGGLVQPGGSLRLSCAASGSGISFNAMGWFRQAPGKERELVAAISRSG |
| 48 | | DTTYYADSVKGRFTISADNSKNTAYLQMNSLKPEDTAVYYCAADLTTWADGPY |
| | | RWGQGTLVTVSS |
| GLP1R-41- | 314 | EVQLVESGGGLVQPGGSLRLSCAASGRTFSfYAMGWFRQAPGKEREFVAAINRG |
| 49 | | GKISHYADSVKGRFTISADNSKNTAYLQMNSLKPEDTAVYYCAAVRRYGNPPHD |
| | | GSSYEWGQGTLVTVSS |
| GLP1R-41- | 315 | EVQLVESGGGLVQPGGSLRLSCAASGRTFSfYGMGWFRQAPGKERELVAIKFSGG |
| 50 | | TTDYADSvkGRFTISADNSKNTAYLQMNSLKPEDTAVYYCAAIAHEEGVYRWGQ |
| | | GTLVTVSS |
| GLP1R-41- | 316 | EVQLVESGGGLVQPGGSLRLSCAASGGIFRFNAMGWFRQAPGKERELVAGISGSG |
| 51 | | GDTYYADSVKGRFTISADNSKNTAYLQMNSLKPEDTAVYYCAAFRGIMRPDWG |
| | | QGTLVTVSS |
| GLP1R-41- | 317 | EVQLVESGGGLVQPGGSLRLSCAASGRTFSfYAMGWFRQAPGKEREFVAAINRG |
| 52 | | GKISHYADSVKGRFTISADNSKNTAYLQMNSLKPEDTAVYYCAAVRRYGSPPHD |
| | | GSSYEWGQGTLVTVSS |
| GLP1R-41- | 318 | EVQLVESGGGLVQPGGSLRLSCAASGSDFSLNAMGWFRQAPGKEREFVAAISWS |
| 53 | | GGSTLYADSVKGRFTISADNSKNTAYLQMNSLKPEDTAVYYCASNESDAYNWG |
| | | QGTLVTVSS |
| GLP1R-41- | 319 | EVQLVESGGGLVQPGGSLRLSCAASGRTLVNYDMGWFRQAPGKEREFVAAIRW |
| 54 | | SGGITWYADSVKGRFTISADNSKNTAYLQMNSLKPEDTAVYYCAAFRGIMLPPW |
| | | GQGTLVTVSS |
| GLP1R-41- | 320 | EVQLVESGGGLVQPGGSLRLSCAASGRTFEKDAMGWFRQAPGKEREMVAAIRW |
| 55 | | SGGITCYADSVKGRFTISADNSKNTAYLQMNSLKPEDTAVYYCAAYGSLPDDYD |
| | | GLECEYDWGQGTLVTVSS |
| GLP1R-41- | 321 | EVQLVESGGGLVQPGGSLRLSCAASGSFFKINAMGWFRQAPGKEREFVAGITRSG |
| 56 | | GSTYYADSVKGRFTISADNSKNTAYLQMNSLKPEDTAVYYCAAESLGRWWGQG |
| | | TLVTVSS |
| GLP1R-41- | 322 | EVQLVESGGGLVQPGGSLRLSCAASGRTFSIDAMGWFRQAPGKEREFVAAIRWS |
| 57 | | GGITWYADSVKGRFTISADNSKNTAYLQMNSLKPEDTAVYYCAASHDSDWGQG |
| | | TLVTVSS |
| GLP1R-41- | 323 | EVQLVESGGGLVQPGGSLRLSCAASGRTFSIDAMGWFRQAPGKEREFVAAIRWS |
| 58 | | GGITWYADSVKGRFTISADNSKNTAYLQMNSLKPEDTAVYYCAASHDSDYGGT |
| | | NANLYDWGQGTLVTVSS |
| GLP1R-41- | 324 | EVQLVESGGGLVQPGGSLRLSCAASGRTDRSNVMGWFRQAPGKEREFVAAINRS |
| 59 | | GSTFYADSVKGRFTISADNSKNTAYLQMNSLKPEDTAVYYCAKTKRTGIFTTAR |
| | | MVDWGQGTLVTVSS |
| GLP1R-41- | 325 | EVQLVESGGGLVQPGGSLRLSCAASGSFFSINVMGWFRQAPGKERELVAATGRR |
| 60 | | GGPTYYADSVKGRFTISADNSKNTAYLQMNSLKPEDTAVYYCAAHRIVVGGTSV |
| | | GDWRWGQGTLVTVSS |
| GLP1R-41- | 326 | EVQLVESGGGLVQPGGSLRLSCAASGFTWGDYTMGWFRQAPGKEREGVAAIDS |
| 61 | | DGRTRYADSVKGRFTISADNSKNTAYLQMNSLKPEDTAVYYCAAALDGYSGNW |
| | | GQGTLVTVSS |
| GLP1R-41- | 327 | EVQLVESGGGLVQPGGSLRLSCAASGNIFSLNTMGWFRQAPGKEREFVAAINCSG |
| 62 | | NHPYYADSVKGRFTISADNSKNTAYLQMNSLKPEDTAVYYCAAIVTYSDDDGRD |
| | | NWGQGTLVTVSS |
| GLP1R-41- | 328 | EVQLVESGGGLVQPGGSLRLSCAASGSIFSINAMGWFRQAPGKEREFVAAVSGSG |
| 63 | | DDTYYADSVKGRFTISADNSKNTAYLQMNSLKPEDTAVYYCAAVQAYSSSSDYY |
| | | SQEGAYDWGQGTLVTVSS |
| GLP1R-41- | 329 | EVQLVESGGGLVQPGGSLRLSCAASGFTFPAYVMGWFRQAPGKERELLAVITRD |
| 64 | | GSTHYADSVKGRFTISADNSKNTAYLQMNSLKPEDTAVYYCAVNGRWRIWSSR |
| | | NPWGQGTLVTVSS |
| GLP1R-41- | 330 | EVQLVESGGGLVQPGGSLRLSCAASGFSFDDDYVMGWFRQAPGKERELVAVIG |
| 65 | | WGGKETWYADSVKGRFTISADNSKNTAYLQMNSLKPEDTAVYYCAAEDPSMGY |
| | | YTLEEYEYDWGQGTLVTVSS |
| GLP1R-41- | 331 | EVQLVESGGGLVQPGGSLRLSCAASGPTFDTYVMGWFRQAPGKEREFVAAISMS |
| 66 | | GDDTAYADSVKGRFTISADNSKNTAYLQMNSLKPEDTAVYYCATDLRGRGDVS |
| | | EYEYDWGQGTLVTVSS |
| GLP1R-41- | 332 | EVQLVESGGGLVQPGGSLRLSCAASGRTFSIDAMGWFRQAPGKEREFVGAITWG |
| 67 | | GGNTYYADSVKGRFTISADNSKNTAYLQMNSLKPEDTAVYYCAAIVTDGDYDG |
| | | WGQGTLVTVSS |
| GLP1R-41- | 333 | EVQLVESGGGLVQPGGSLRLSCAASGNTFSINVMGWFRQAPGKEREFVAAINWN |
| 68 | | GGSTDYADSVKGRFTISADNSKNTAYLQMNSLKPEDTAVYYCAAIVTYSDYDLD |
| | | NDWGQGTLVTVSS |
| GLP1R-41- | 334 | EVQLVESGGGLVQPGGSLRLSCAASGFTFSTHWMGWFRQAPGKEREVVAVIYTS |
| 69 | | DGSTYYADSVKGRFTISADNSKNTAYLQMNSLKPEDTAVYYCAANEYGLGSSIY |
| | | AYKWGQGTLVTVSS |
| GLP1R-41- | 335 | EVQLVESGGGLVQPGGSLRLSCAASGRTFSISAMGWFRQAPGKEREFVAAISRSG |
| 70 | | GTTYYADSVKGRFTISADNSKNTAYLQMNSLKPEDTAVYYCATDEDYALGPNEY |
| | | DWGQGTLVTVSS |
| GLP1R-41- | 336 | EVQLVESGGGLVQPGGSLRLSCAASGSTFRINAMGWFRQAPGKERELVAAISPAA |
| 71 | | LTTYYADSVKGRFTISADNSKNTAYLQMNSLKPEDTAVYYCAAEPYGSGSLYDD |
| | | YDGLPIKYDWGQGTLVTVSS |
| GLP1R-41- | 337 | EVQLVESGGGLVQPGGSLRLSCAASGFTDGIDAMGWFRQAPGKEREFVAAISWS |
| 72 | | NDITYYADSVKGRFTISADNSKNTAYLQMNSLKPEDTAVYYCAAALSEVWRGSE |
| | | NLREGYDWGQGTLVTVSS |
| GLP1R-41- | 338 | EVQLVESGGGLVQPGGSLRLSCAASGLPVDYYAMGWFRQAPGKERELVAAISGS |
| 73 | | GDSTYYADSVKGRFTISADNSKNTAYLQMNSLKPEDTAVYYCAAQTEDSASIFG |
| | | YGMDWGQGTLVTVSS |
| GLP1R-41- | 339 | EVQLVESGGGLVQPGGSLRLSCAASGRTLSTVNMGWFRQAPGKEREFVGAISRS |
| 74 | | GETTWYADSVKGRFTISADNSKNTAYLQMNSLKPEDTAVYYCAVDCPDYYSDY |
| | | ECPLEWGQGTLVTVSS |
| GLP1R-41- | 340 | EVQLVESGGGLVQPGGSLRLSCAASGFSFDDYAMGWFRQAPGKERELVAAVRW |
| 75 | | SGGITWYADSVKGRFTISADNSKNTAYLQMNSLKPEDTAVYYCAAGDTGGAAY |
| | | GWGQGTLVTVSS |
| GLP1R-41- | 341 | EVQLVESGGGLVQPGGSLRLSCAASGSTLSINAMGWFRQAPGKEREGVSWISSSD |
| 76 | | GSTYYADSVKGRFTISADNSKNTAYLQMNSLKPEDTAVYYCAAALDGYSGRWG |
| | | QGTLVTVSS |
| GLP1R-41- | 342 | EVQLVESGGGLVQPGGSLRLSCAASGSSVSIDAMGWFRQAPGKEREFVAGISRSG |
| 77 | | DTTYYADSVKGRFTISADNSKNTAYLQMNSLKPEDTAVYYCAASYNVYYNNYY |
| | | YPISRDEYDWGQGTLVTVSS |
| GLP1R-41- | 343 | EVQLVESGGGLVQPGGSLRLSCAASGSIFRVNVMGWFRQAPGKERELVAVTWSG |
| 78 | | GSTNYADSVKGRFTISADNSKNTAYLQMNSLKPEDTAVYYCAAIAYEEGVYRW |
| | | DWGQGTLVTVSS |
| GLP1R-41- | 344 | EVQLVESGGGLVQPGGSLRLSCAASGRTFSfYAMGWFRQAPGKEREFVAVVNWS |
| 79 | | GRRTYYADSVKGRFTISADNSKNTAYLQMNSLKPEDTAVYYCAASSRMGVDDP |
| | | ETYGWGQGTLVTVSS |
| GLP1R-41- | 345 | EVQLVESGGGLVQPGGSLRLSCAASGFTFDDAAMGWFRQAPGKEREFVAAVRW |
| 80 | | RGGITWYADSVKGRFTISADNSKNTAYLQMNSLKPEDTAVYYCAAQGSLYDDY |
| | | DGLPIKYDWGQGTLVTVSS |
| GLP1R-41- | 346 | EVQLVESGGGLVQPGGSLRLSCAASGSIFRINAMGWFRQAPGKERELVASISRFG |
| 81 | | RTNYADSVKGRFTISADNSKNTAYLQMNSLKPEDTAVYYCAANGIESWGQGTLV |
| | | TVSS |
| GLP1R-41- | 347 | EVQLVESGGGLVQPGGSLRLSCAASGFTWGDYTMGWFRQAPGKEREFVASITSG |
| 82 | | GRMWYADSVKGRFTISADNSKNTAYLQMNSLKPEDTAVYYCAAALDGYSGSW |
| | | GQGTLVTVSS |
| GLP1R-41- | 348 | EVQLVESGGGLVQPGGSLRLSCAASGFRFSSYGMGWFRQAPGKEREGVAAIGSD |
| 83 | | GSTSYADSVKGRFTISADNSKNTAYLQMNSLKPEDTAVYYCASWDGRQVWGQG |
| | | TLVTVSS |
| GLP1R-41- | 349 | EVQLVESGGGLVQPGGSLRLSCAASGRTFDNYNMGWFRQAPGKEREFVAAISW |
| 84 | | NGVTIYYADSVKGRFTISADNSKNTAYLQMNSLKPEDTAVYYCAAQGSLYDDW |
| | | GQGTLVTVSS |
| GLP1R-41- | 350 | EVQLVESGGGLVQPGGSLRLSCAASGFTFSTYSMGWFRQAPGKEREFVAAISSGG |
| 85 | | LKAYADSVKGRFTISADNSKNTAYLQMNSLKPEDTAVYYCAAALDDYSGSWGQ |
| | | GTLVTVSS |
| GLP1R-41- | 351 | EVQLVESGGGLVQPGGSLRLSCAASGYTFRAYVMGWFRQAPGKERELLAVITRD |
| 86 | | GSTHYADSVKGRFTISADNSKNTAYLQMNSLKPEDTAVYYCAVNGRWRSWSSR |
| | | NPWGQGTLVTVSS |
| GLP1R-41- | 352 | EVQLVESGGGLVQPGGSLRLSCAASGRTFSIYAMGWFRQAPGKEREFVAAISRGS |
| 87 | | NSTDYADSVKGRFTISADNSKNTAYLQMNSLKPEDTAVYYCAAIVTYTDYDLWG |
| | | QGTLVTVSS |
| GLP1R-41- | 353 | EVQLVESGGGLVQPGGSLRLSCAASGRTISSYAMGWFRQAPGKERELVAAISKSS |
| 88 | | ISTYYADSVKGRFTISADNSKNTAYLQMNSLKPEDTAVYYCALGPVRRSRLEWG |
| | | QGTLVTVSS |
| GLP1R-41- | 354 | EVQLVESGGGLVQPGGSLRLSCAASGPTFDTYVMGWFRQAPGKEREFVAAISWT |
| 89 | | GDSSSDGDTYYADSVKGRFTISADNSKNTAYLQMNSLKPEDTAVYYCAAAIFDV |
| | | TDYERADWGQGTLVTVSS |
| GLP1R-41- | 355 | EVQLVESGGGLVQPGGSLRLSCAASGFTLGNYAMGWFRQAPGKERELVSAITWS |
| 90 | | DGSSYYADSVKGRFTISADNSKNTAYLQMNSLKPEDTAVYYCASTRFAGRWGQ |
| | | GTLVTVSS |
| GLP1R-41- | 356 | EVQLVESGGGLVQPGGSLRLSCAASGNIDRLYAMGWFRQAPGKEREPVAAISPA |
| 91 | | AVTAGMTYYADSVKGRFTISADNSKNTAYLQMNSLKPEDTAVYYCAAYGSGSY |
| | | YYTDDELDWGQGTLVTVSS |
| GLP1R-41- | 357 | EVQLVESGGGLVQPGGSLRLSCAASGRTFGRRAMGWFRQAPGKERELVAAIRWS |
| 92 | | GKETWYADSVKGRFTISADNSKNTAYLQMNSLKPEDTAVYYCAAGNGGRTYGH |
| | | SRARYEWGQGTLVTVSS |
| GLP1R-41- | 358 | EVQLVESGGGLVQPGGSLRLSCAASGRTFSIGAMGWFRQAPGKEREYVGSITWR |
| 93 | | GGNTYYADSVKGRFTISADNSKNTAYLQMNSLKPEDTAVYYCAAGVTGGAAYG |
| | | WGQGTLVTVSS |
| GLP1R-41- | 359 | EVQLVESGGGLVQPGGSLRLSCAASGLTFSTYWMGWFRQAPGKEREVVAVIYTS |
| 94 | | DGSTYYADSVKGRFTISADNSKNTAYLQMNSLKPEDTAVYYCATIDGSWREWG |
| | | QGTLVTVSS |
| GLP1R-41- | 360 | EVQLVESGGGLVQPGGSLRLSCAASGFGIDfyAMGWFRQAPGKEREFVAAISGSG |
| 95 | | DDTYYADSVKGRFTISADNSKNTAYLQMNSLKPEDTAVYYCAASASDYGLGLEL |
| | | FHDEYNWGQGTLVTVSS |
| GLP1R-41- | 361 | EVQLVESGGGLVQPGGSLRLSCAASGNILSLNTMGWFRQAPGKEREFVASVTWG |
| 96 | | FGSTSYADSVKGRFTISADNSKNTAYLQMNSLKPEDTAVYYCAAIVTYSDYDLG |
| | | NDWGQGTLVTVSS |
| GLP1R-41- | 362 | EVQLVESGGGLVQPGGSLRLSCAASGSIYSLDAMGWFRQAPGKEREFVAAISPAA |
| 97 | | LTTYYADSVKGRFTISADNSKNTAYLQMNSLKPEDTAVYYCAGSSRIYIYSDSLSE |
| | | RSYDWGQGTLVTVSS |
| GLP1R-41- | 363 | EVQLVESGGGLVQPGGSLRLSCAASGRTFSfYGMGWFRQAPGKERELVAIKFSGG |
| 98 | | TTDYADSVKGRFTISADNSKNTAYLQMNSLKPEDTAVYYCAAIAHEEGVYRWD |
| | | WGQGTLVTVSS |
| GLP1R-41- | 364 | EVQLVESGGGLVQPGGSLRLSCAASGRTFSKYAMGWFRQAPGKEREFVAAIRWS |
| 99 | | GGTTFYADSVKGRFTISADNSKNTAYLQMNSLKPEDTAVYYCAAGGWGTGRYN |
| | | WGQGTLVTVSS |
| GLP1R-44- | 365 | EVQLVESGGGLVQPGGSLRLSCAASGSIFSIYAMDWFRQAPGKEREFVAAISSDDS |
| 01 | | TTYYADSVKGRFTISADNSKNTAYLQMNSLKPEDTAVYYCTAVLPAYDDWGQG |
| | | TLVTVSS |
| GLP1R-44- | 366 | EVQLVESGGGLVQPGGSLRLSCAASGFNSGSYTMGWFRQAPGKEREGVSYISSSD |
| 02 | | GRTYYADSVKGRFTISADNSKNTAYLQMNSLKPEDTAVYYCAAGLNGAAAAWG |
| | | QGTLVTVSS |
| GLP1R-44- | 367 | EVQLVESGGGLVQPGGSLRLSCAASGRTFSNGPMGWFRQAPGKEREFVAHISTG |
| 03 | | GATNYADSVKGRFTISADNSKNTAYLQMNSLKPEDTAVYYCASWDGRQGWGQ |
| | | GTLVTVSS |
| GLP1R-44- | 368 | EVQLVESGGGLVQPGGSLRLSCAASGRALSSYSMGWFRQAPGKEREFVALITRSG |
| 04 | | GTTFYADSVKGRFTISADNSKNTAYLQMNSLKPEDTAVYYCALDNRHSYVDWG |
| | | QGTLVTVSS |
| GLP1R-44- | 369 | EVQLVESGGGLVQPGGSLRLSCAASGSIGSINAMGWFRQAPGKEREFVAAISWSG |
| 05 | | GATNYADSVKGRFTISADNSKNTAYLQMNSLKPEDTAVYYCAASVAYSDYDLG |
| | | NDWGQGTLVTVSS |
| GLP1R-44- | 370 | EVQLVESGGGLVQPGGSLRLSCAASGLSFDDYAMGWFRQAPGKEREFVAAISGR |
| 06 | | SGNTYYADSVKGRFTISADNSKNTAYLQMNSLKPEDTAVYYCALIQRRAPYSRLE |
| | | TWGQGTLVTVSS |
| GLP1R-44- | 371 | EVQLVESGGGLVQPGGSLRLSCAASGFTFSIYAMGWFRQAPGKEREGVAAISWS |
| 07 | | GGTTYYADSVKGRFTISADNSKNTAYLQMNSLKPEDTAVYYCAAAAGWVAEYG |
| | | YWGQGTLVTVSS |
| GLP1R-44- | 372 | EVQLVESGGGLVQPGGSLRLSCAASGGTFSSYAMGWFRQAPGKEREFVATISSNG |
| 08 | | NTTYYADSVKGRFTISADNSKNTAYLQMNSLKPEDTAVYYCAADLRVLRLRRYE |
| | | YNYWGQGTLVTVSS |
| GLP1R-44- | 373 | EVQLVESGGGLVQPGGSLRLSCAASGFTFRSNAMGWFRQAPGKEREGVAAISTS |
| 09 | | GGITYYADSVKGRFTISADNSKNTAYLQMNSLKPEDTAVYYCAAERDGYGYWG |
| | | QGTLVTVSS |
| GLP1R-44- | 374 | EVQLVESGGGLVQPGGSLRLSCAASGFTFDDYAMGWFRQAPGKERELVAGISWN |
| 10 | | GGITYYADSVKGRFTISADNSKNTAYLQMNSLKPEDTAVYYCAVVRAGYDYWG |
| | | QGTLVTVSS |
| GLP1R-44- | 375 | EVQLVESGGGLVQPGGSLRLSCAASGSTFSIYAMGWFRQAPGKEREWVATISWS |
| 11 | | GGSTNYADSVKGRFTISADNSKNTAYLQMNSLKPEDTAVYYCAVGRSGRDYWG |
| | | QGTLVTVSS |
| GLP1R-44- | 376 | EVQLVESGGGLVQPGGSLRLSCAASGRAFESYAMGWFRQAPGKEREFVAAIRWS |
| 12 | | GGSTYYADSVKGRFTISADNSKNTAYLQMNSLKPEDTAVYYCATGGWGTGRYN |
| | | WGQGTLVTVSS |
| GLP1R-44- | 377 | EVQLVESGGGLVQPGGSLRLSCAASGRIFSDYAMGWFRQAPGKEREFVATINGD |
| 13 | | GDSTNYADSVKGRFTISADNSKNTAYLQMNSLKPEDTAVYYCAANTYWYYTYD |
| | | SWGQGTLVTVSS |
| GLP1R-44- | 378 | EVQLVESGGGLVQPGGSLRLSCAASGRIFSDYAMGWFRQAPGKEREFVATINGD |
| 14 | | GDSTNYADSVKGRFTISADNSKNTAYLQMNSLKPEDTAVYYCAANTYCNYTYD |
| | | SWGQGTLVTVSS |
| GLP1R-44- | 379 | EVQLVESGGGLVQPGGSLRLSCAASGRTLSRSNMGWFRQAPGKEREFVAAVRW |
| 15 | | SGGITWYADSVKGRFTISADNSKNTAYLQMNSLKPEDTAVYYCALGPVRRSRLE |
| | | WGQGTLVTVSS |
| GLP1R-44- | 380 | EVQLVESGGGLVQPGGSLRLSCAASGFTFSTYAMGWFRQAPGKEREFVAAITWS |
| 16 | | GGSTNYADSVKGRFTISADNSKNTAYLQMNSLKPEDTAVYYCAAGRAGRDSWG |
| | | QGTLVTVSS |
| GLP1R-44- | 381 | EVQLVESGGGLVQPGGSLRLSCAASGRTFNSYAMGWFRQAPGKEREFVAGITRS |
| 17 | | AVSTSYADSVKGRFTISADNSKNTAYLQMNSLKPEDTAVYYCAAFRGIMRPDWG |
| | | QGTLVTVSS |
| GLP1R-44- | 382 | EVQLVESGGGLVQPGGSLRLSCAASGFTFRNYVMGWFRQAPGKEREFVASITWS |
| 18 | | GGTTYYADSVKGRFTISADNSKNTAYLQMNSLKPEDTAVYYCAAGRGSGRDYW |
| | | GQGTLVTVSS |
| GLP1R-44- | 383 | EVQLVESGGGLVQPGGSLRLSCAASGRALSSNSMGWFRQAPGKEREFVALITRSG |
| 19 | | GTTFYADSVKGRFTISADNSKNTAYLQMNSLKPEDTAVYYCALNNRRRYVDWG |
| | | QGTLVTVSS |
| GLP1R-44- | 384 | EVQLVESGGGLVQPGGSLRLSCAASGRTFSSYAMGWFRQAPGKEREFVAAISWS |
| 20 | | GGSTYYADSVKGRFTISADNSKNTAYLQMNSLKPEDTAVYYCAVGRNGRDYWG |
| | | QGTLVTVSS |
| GLP1R-44- | 385 | EVQLVESGGGLVQPGGSLRLSCAASGSTFSIYAMGWFRQAPGKEREFVAAISWSG |
| 21 | | GNTYYADSVKGRFTISADNSKNTAYLQMNSLKPEDTAVYYCAAVPTIAYNTGYD |
| | | YWGQGTLVTVSS |
| GLP1R-44- | 386 | EVQLVESGGGLVQPGGSLRLSCAASGRTEDDYAMGWFRQAPGKERELVSGITWS |
| 22 | | GGSTYYADSVKGRFTISADNSKNTAYLQMNSLKPEDTAVYYCAAVLGYDGYDY |
| | | WGQGTLVTVSS |
| GLP1R-44- | 387 | EVQLVESGGGLVQPGGSLRLSCAASGRTFSIYAMGWFRQAPGKERELVSAISTDD |
| 23 | | GSTYYADSVKGRFTISADNSKNTAYLQMNSLKPEDTAVYYCAAALPDDTYLATT |
| | | YDYWGQGTLVTVSS |
| GLP1R-44- | 388 | EVQLVESGGGLVQPGGSLRLSCAASGSIFSDNVMGWFRQAPGKEREMVAAIRWS |
| 24 | | GGITWYADSVKGRFTISADNSKNTAYLQMNSLKPEDTAVYYCATDLSGRGDVSE |
| | | YEYDWGQGTLVTVSS |
| GLP1R-44- | 389 | EVQLVESGGGLVQPGGSLRLSCAASGEIASIIAMGWFRQAPGKEREWVSAINSGG |
| 25 | | DTYYADSVKGRFTISADNSKNTAYLQMNSLKPEDTAVYYCAADRSRTIWPDWG |
| | | QGTLVTVSS |
| GLP1R-44- | 390 | EVQLVESGGGLVQPGGSLRLSCAASGRTFSVSTMGWFRQAPGKEREIVAAITWSG |
| 26 | | SATYYADSVKGRFTISADNSKNTAYLQMNSLKPEDTAVYYCAAQRRWSQDWGQ |
| | | GTLVTVSS |
| GLP1R-44- | 391 | EVQLVESGGGLVQPGGSLRLSCAASGRTFSSYAMGWFRQAPGKERELVAGITGG |
| 27 | | GSSTYYADSVKGRFTISADNSKNTAYLQMNSLKPEDTAVYYCAAVTRYGYDYW |
| | | GQGTLVTVSS |
| GLP1R-44- | 392 | EVQLVESGGGLVQPGGSLRLSCAASGIPFRSRTMGWFRQAPGKEREFVAGITRNSI |
| 28 | | RTRYADSVKGRFTISADNSKNTAYLQMNSLKPEDTAVYYCAAAPRRPYLPIRIRD |
| | | YIWGQGTLVTVSS |
| GLP1R-44- | 393 | EVQLVESGGGLVQPGGSLRLSCAASGRTIVPYTMGWFRQAPGKEREFVAAISWS |
| 29 | | GASTIYADSVKGRFTISADNSKNTAYLQMNSLKPEDTAVYYCAIGGTLYDRRRFE |
| | | WGQGTLVTVSS |
| GLP1R-44- | 394 | EVQLVESGGGLVQPGGSLRLSCAASGFTFSNNAMGWFRQAPGKEREGVAAINGS |
| 30 | | GSITYYADSVKGRFTISADNSKNTAYLQMNSLKPEDTAVYYCAAARDDYGYWG |
| | | QGTLVTVSS |
| GLP1R-44- | 395 | EVQLVESGGGLVQPGGSLRLSCAASGRTFSIYGMGWFRQAPGKEREGVAGISWS |
| 31 | | DGSTSYADSVKGRFTISADNSKNTAYLQMNSLKPEDTAVYYCAAASDASFDYW |
| | | GQGTLVTVSS |
| GLP1R-44- | 396 | EVQLVESGGGLVQPGGSLRLSCAASGGTFSDYGMGWFRQAPGKEREGVASISWN |
| 32 | | DGSTSYADSVKGRFTISADNSKNTAYLQMNSLKPEDTAVYYCAAATADYDYWG |
| | | QGTLVTVSS |
| GLP1R-44- | 397 | EVQLVESGGGLVQPGGSLRLSCAASGSTFSTYAMGWFRQAPGKERELVAAISWS |
| 33 | | SGTTYYADSVKGRFTISADNSKNTAYLQMNSLKPEDTAVYYCAAVLVTSDGVSE |
| | | YNYWGQGTLVTVSS |
| GLP1R-44- | 398 | EVQLVESGGGLVQPGGSLRLSCAASGFLFDSYAMGWFRQAPGKEREPVAAISPA |
| 34 | | ALTTYYADSVKGRFTISADNSKNTAYLQMNSLKPEDTAVYYCAAYYTDYDEALE |
| | | ETRGSYDWGQGTLVTVSS |
| GLP1R-44- | 399 | EVQLVESGGGLVQPGGSLRLSCAASGFTLSNYAMGWFRQAPGKEREGVAAISWN |
| 35 | | SGSTYYADSVKGRFTISADNSKNTAYLQMNSLKPEDTAVYYCATDARRYGYWG |
| | | QGTLVTVSS |
| GLP1R-44- | 400 | EVQLVESGGGLVQPGGSLRLSCAASGSTFGNYAMGWFRQAPGKEREFVAAISRS |
| 36 | | GSITYYADSVKGRFTISADNSKNTAYLQMNSLKPEDTAVYYCATDEDYALGPNE |
| | | YDWGQGTLVTVSS |
| GLP1R-44- | 401 | EVQLVESGGGLVQPGGSLRLSCAASGRTFSIYAMGWFRQAPGKERELVAGISWG |
| 37 | | GDSTYYADSVKGRFTISADNSKNTAYLQMNSLKPEDTAVYYCAAVAGNGYDYW |
| | | GQGTLVTVSS |
| GLP1R-44- | 402 | EVQLVESGGGLVQPGGSLRLSCAASGFNSGSYTMGWFRQAPGKEREGVSYISSSD |
| 38 | | GRTYYADSVKGRFTISADNSKNTAYLQMNSLKPEDTAVYYCAAALDGYSGSWG |
| | | QGTLVTVSS |
| GLP1R-44- | 403 | EVQLVESGGGLVQPGGSLRLSCAASGLTFWTSGMGWFRQAPGKEREYVAAISRS |
| 39 | | GSLKGYADSVKGRFTISADNSKNTAYLQMNSLKPEDTAVYYCATVATALIWGQG |
| | | TLVTVSS |
| GLP1R-44- | 404 | EVQLVESGGGLVQPGGSLRLSCAASGFTFSINAMGWFRQAPGKERELVSGISWGG |
| 40 | | GSTYYADSVKGRFTISADNSKNTAYLQMNSLKPEDTAVYYCAAVNEDGFDYWG |
| | | QGTLVTVSS |
| GLP1R-44- | 405 | EVQLVESGGGLVQPGGSLRLSCAASGFTFDDNAMGWFRQAPGKERELVAAISTS |
| 41 | | GSNTYYADSVKGRFTISADNSKNTAYLQMNSLKPEDTAVYYCAAELREYGYWG |
| | | QGTLVTVSS |
| GLP1R-44- | 40€ | EVQLVESGGGLVQPGGSLRLSCAASGRTFTSYNMGWFRQAPGKEREFLGSILWS |
| 42 | | DDSTNYADSVKGRFTISADNSKNTAYLQMNSLKPEDTAVYYCASWDGRQVWGQ |
| | | GTLVTVSS |
| GLP1R-44- | 407 | EVQLVESGGGLVQPGGSLRLSCAASGFTFRNYVMGWFRQAPGKEREFVAAINW |
| 43 | | NGSITYYADSVKGRFTISADNSKNTAYLQMNSLKPEDTAVYYCAAGRSARNYW |
| | | GQGTLVTVSS |
| GLP1R-44- | 408 | EVQLVESGGGLVQPGGSLRLSCAASGRTFSSYAMGWFRQAPGKEREFVAAISTSG |
| 44 | | GITYYADSVKGRFTISADNSKNTAYLQMNSLKPEDTAVYYCATDRIEYSRGGYD |
| | | YWGQGTLVTVSS |
| GLP1R-44- | 409 | EVQLVESGGGLVQPGGSLRLSCAASGSTFRKYAMGWFRQAPGKEREFVAAISSG |
| 45 | | GGSTNYADSVKGRFTISADNSKNTAYLQMNSLKPEDTAVYYCAAGRYRERDSW |
| | | GQGTLVTVSS |
| GLP1R-44- | 410 | EVQLVESGGGLVQPGGSLRLSCAASGSTFSIYAMGWFRQAPGKEREFVAAISWSG |
| 46 | | DTTYYADSVKGRFTISADNSKNTAYLQMNSLKPEDTAVYYCAIDLPDDTYLATE |
| | | YDYWGQGTLVTVSS |
| GLP1R-44- | 411 | EVQLVESGGGLVQPGGSLRLSCAASGSGFSPNVMGWFRQAPGKERELVAIKFSG |
| 47 | | GTTDYADSVKGRFTISADNSKNTAYLQMNSLKPEDTAVYYCAAIAYEEGVYRW |
| | | DWGQGTLVTVSS |
| GLP1R-44- | 412 | EVQLVESGGGLVQPGGSLRLSCAASGRTLTNHDMGWFRQAPGKEREGVSYISMS |
| 48 | | DGRTYYADSVKGRFTISADNSKNTAYLQMNSLKPEDTAVYYCAAVLDGYSGSW |
| | | GQGTLVTVSS |
| GLP1R-44- | 413 | EVQLVESGGGLVQPGGSLRLSCAASGSTFSIYAMGWFRQAPGKEREFVAAISRSG |
| 49 | | DSTYYADSVKGRFTISADNSKNTAYLQMNSLKPEDTAVYYCAAVTLDNYGYWG |
| | | QGTLVTVSS |
| GLP1R-44- | 414 | EVQLVESGGGLVQPGGSLRLSCAASGGTASSYHMGWFRQAPGKEREFVAFIHRS |
| 50 | | GTSTYYADSVKGRFTISADNSKNTAYLQMNSLKPEDTAVYYCAADSITDRRSVA |
| | | VAHTSYYWGQGTLVTVSS |
| GLP1R-44- | 415 | EVQLVESGGGLVQPGGSLRLSCAASGLTFSTYAMGWFRQAPGKEREIVAAITWS |
| 51 | | GGITYYADSVKGRFTISADNSKNTAYLQMNSLKPEDTAVYYCAAHGSILLDRIEW |
| | | GQGTLVTVSS |
| GLP1R-44- | 416 | EVQLVESGGGLVQPGGSLRLSCAASGGTFSIYAMGWFRQAPGKERELVAAISSSG |
| 52 | | SITYYADSVKGRFTISADNSKNTAYLQMNSLKPEDTAVYYCAAAAALDGPGDMY |
| | | DYWGQGTLVTVSS |
| GLP1R-44- | 417 | EVQLVESGGGLVQPGGSLRLSCAASGGTFDNYAMGWFRQAPGKERELVSGINSD |
| 53 | | GGSTYYADSVKGRFTISADNSKNTAYLQMNSLKPEDTAVYYCAAVPISSPSDRNY |
| | | WGQGTLVTVSS |
| GLP1R-44- | 418 | EVQLVESGGGLVQPGGSLRLSCAASGRTFSLTAMGWFRQAPGKEREFVAAISPAA |
| 54 | | LTTYYADSVKGRFTISADNSKNTAYLQMNSLKPEDTAVYYCASRRAFRLSSDYE |
| | | WGQGTLVTVSS |
| GLP1R-44- | 419 | EVQLVESGGGLVQPGGSLRLSCAASGRNLRMYRMGWFRQAPGKEREFVAAVN |
| 55 | | WNGDSTYYADSVKGRFTISADNSKNTAYLQMNSLKPEDTAVYYCAANWKMLL |
| | | GVENDWGQGTLVTVSS |
| GLP1R-44- | 420 | EVQLVESGGGLVQPGGSLRLSCAASGFTFDIYAMGWFRQAPGKERELVAGISSSG |
| 56 | | GSTYYADSVKGRFTISADNSKNTAYLQMNSLKPEDTAVYYCAAVLGTYDYWGQ |
| | | GTLVTVSS |
| GLP1R-44- | 421 | EVQLVESGGGLVQPGGSLRLSCAASGRTFDIYAMGWFRQAPGKERELVAAINRD |
| 57 | | DSSTYYADSVKGRFTISADNSKNTAYLQMNSLKPEDTAVYYCAAVAGLGNYNY |
| | | WGQGTLVTVSS |
| GLP1R-44- | 422 | EVQLVESGGGLVQPGGSLRLSCAASGRSFSFNAMGWFRQAPGKERELVAAITKL |
| 58 | | GFRNYADSVKGRFTISADNSKNTAYLQMNSLKPEDTAVYYCAASIEGVSGRWGQ |
| | | GTLVTVSS |
| GLP1R-44- | 423 | EVQLVESGGGLVQPGGSLRLSCAASGSFFSINAMGWFRQAPGKERELVSASTWN |
| 59 | | GGYTYYADSVKGRFTISADNSKNTAYLQMNSLKPEDTAVYYCAAHRIVVGGTSV |
| | | GDWRWGQGTLVTVSS |
| GLP1R-44- | 424 | EVQLVESGGGLVQPGGSLRLSCAASGRTFSDYAMGWFRQAPGKEREFVAGITSS |
| 60 | | GGYTYYADSVKGRFTISADNSKNTAYLQMNSLKPEDTAVYYCAAVVYYGDWE |
| | | GSEPVQHEYDWGQGTLVTVSS |
| GLP1R-44- | 425 | EVQLVESGGGLVQPGGSLRLSCAASGSIFSRNAMGWFRQAPGKEREFVAAIRWS |
| 61 | | GKETWYADSVKGRFTISADNSKNTAYLQMNSLKPEDTAVYYCAKTKRTGIFTTA |
| | | RMVDWGQGTLVTVSS |
| GLP1R-44- | 426 | EVQLVESGGGLVQPGGSLRLSCAASGGTFDTYAMGWFRQAPGKEREFVAGISGD |
| 62 | | GTITYYADSVKGRFTISADNSKNTAYLQMNSLKPEDTAVYYCATDNPYWSGYNY |
| | | WGQGTLVTVSS |
| GLP1R-44- | 427 | EVQLVESGGGLVQPGGSLRLSCAASGGTFSNYAMGWFRQAPGKERELVSGINSD |
| 63 | | GGSTYYADSVKGRFTISADNSKNTAYLQMNSLKPEDTAVYYCAAVSTNDGYDY |
| | | WGQGTLVTVSS |
| GLP1R-44- | 428 | EVQLVESGGGLVQPGGSLRLSCAASGGIYRVNTMGWFRQAPGKERELVAIKFSG |
| 64 | | GTTDYADSVKGRFTISADNSKNTAYLQMNSLKPEDTAVYYCAAIAHEEGVYRW |
| | | DWGQGTLVTVSS |
| GLP1R-44- | 429 | EVQLVESGGGLVQPGGSLRLSCAASGFTFSTYAMGWFRQAPGKERELVAGISSSG |
| 65 | | SSTYYADSVKGRFTISADNSKNTAYLQMNSLKPEDTAVYYCAVVSDGGYDYWG |
| | | QGTLVTVSS |
| GLP1R-44- | 430 | EVQLVESGGGLVQPGGSLRLSCAASGRTSSIYNMGWFRQAPGKEREFVAAISRSG |
| 66 | | RSTSYADSVKGRFTISADNSKNTAYLQMNSLKPEDTAVYYCAAIVTYSDYDLGN |
| | | DWGQGTLVTVSS |
| GLP1R-44- | 431 | EVQLVESGGGLVQPGGSLRLSCAASGRALSSYSMGWFRQAPGKEREFVALITRSG |
| 67 | | GTTFYADSVKGRFTISADNSKNTAYLQMNSLKPEDTAVYYCALDNRRSYVDWG |
| | | QGTLVTVSS |
| GLP1R-44- | 432 | EVQLVESGGGLVQPGGSLRLSCAASGRALSRYGMVWFRQAPGKEREFVAAINRG |
| 68 | | GKISHYADSVKGRFTISADNSKNTAYLQMNSLKPEDTAVYYCAAGNGGRNYGHS |
| | | RARYEWGQGTLVTVSS |
| GLP1R-44- | 433 | EVQLVESGGGLVQPGGSLRLSCAASGFKFNDSYMRWFRQAPGKEREFVVAINWS |
| 69 | | SGSTYYADSVKGRFTISADNSKNTAYLQMNSLKPEDTAVYYCAVVNGPIFWGQG |
| | | TLVTVSS |
| GLP1R-44- | 434 | EVQLVESGGGLVQPGGSLRLSCAASGRTLSDYALGWFRQAPGKERELVSGINTSG |
| 70 | | DTTYYADSVKGRFTISADNSKNTAYLQMNSLKPEDTAVYYCAVVTSSYDYWGQ |
| | | GTLVTVSS |
| GLP1R-44- | 435 | EVQLVESGGGLVQPGGSLRLSCAASGSTFDIYGMGWFRQAPGKEREGVAAITGD |
| 71 | | GSSTSYADSVKGRFTISADNSKNTAYLQMNSLKPEDTAVYYCAADNDTEYGYW |
| | | GQGTLVTVSS |
| GLP1R-44- | 436 | EVQLVESGGGLVQPGGSLRLSCAASGGTLDIYAMGWFRQAPGKEREFVAAISWS |
| 72 | | GSTTYYADSVKGRFTISADNSKNTAYLQMNSLKPEDTAVYYCAAVLGYDRDYW |
| | | GQGTLVTVSS |
| GLP1R-44- | 437 | EVQLVESGGGLVQPGGSLRLSCAASGRPYSYDAMGWFRQAPGKEREIVAAISRT |
| 73 | | GSSIYYADSVKGRFTISADNSKNTAYLQMNSLKPEDTAVYYCAAQGSLYDDYDG |
| | | LPIKYDWGQGTLVTVSS |
| GLP1R-44- | 438 | EVQLVESGGGLVQPGGSLRLSCAASGRTFRTYGMGWFRQAPGKEREGVAAISWS |
| 74 | | GNSTSYADSVKGRFTISADNSKNTAYLQMNSLKPEDTAVYYCAARLSKRGNRSS |
| | | RDYWGQGTLVTVSS |
| GLP1R-44- | 439 | EVQLVESGGGLVQPGGSLRLSCAASGSTFDNYAMGWFRQAPGKERELVAGINWS |
| 75 | | DSSTYYADSVKGRFTISADNSKNTAYLQMNSLKPEDTAVYYCAAVAGWGEYDY |
| | | WGQGTLVTVSS |
| GLP1R-44- | 440 | EVQLVESGGGLVQPGGSLRLSCAASGSTFSIYAMGWFRQAPGKERELVAGINWS |
| 76 | | DSSTYYADSVKGRFTISADNSKNTAYLQMNSLKPEDTAVYYCAAVTDYDEYNY |
| | | WGQGTLVTVSS |

TABLE 12
Variable Heavy Chain CDRs

| | SEQ ID | | SEQ ID | | SEQ ID | |
|---|---|---|---|---|---|---|
| Variant | NO | CDR1 | NO | CDR2 | NO | CDR3 |
| GLP1R-3 | 44 | GFTFSSYG | 620 | ISYDESNK | 799 | AKHMSMQEGAVTGEG |
| | | | | | | QAAKEFIAWLVKGRVR |
| | | | | | | ADLVGDAFDV |
| GLP1R221- | 442 | GFTFSDYG | 621 | ISYDRSNE | 800 | AKHMSMQEGAVTGDG |
| 065 | | | | | | QAAKEFIAWLVKGRVR |
| | | | | | | ADLVGDAFDV |
| GLP1R221- | 443 | GFTFSDYG | 622 | ISYDETNK | 80 | AKHMSMQEGAVTGEG |
| 075 | | | | | | QAAKEFIAWLVKGIVR |
| | | | | | | ADLVGDAFDV |
| GLP1R221- | 444 | GFTFSDYG | 623 | ISYDESNK | 802 | AKHMSMQEGAVTGEY |
| 017 | | | | | | QAAKEFIAWLVKGRVR |
| | | | | | | ADLVGDAFDV |
| GLP1R221- | 445 | GFTFSDYG | 624 | ISHDRSNK | 803 | AKHMSMQEGAVTGEG |
| 033 | | | | | | QAAKDFIAWL VKGRVR |
| | | | | | | ADLVGDAFDV |
| GLP1R221- | 446 | GFTFSDYG | 625 | ISYDETNK | 804 | AKHMSMQEGAVTGEG |
| 076 | | | | | | QAAKEFIAWLVKGIVR |
| | | | | | | ADLVGDAFDV |
| GLP1R221- | 447 | GFTFSDYG | 626 | ISYGGSNK | 805 | AKHMSMQEGAVTGEG |
| 092 | | | | | | QAVKEFIAWLVKGRVR |
| | | | | | | ADLVGDAFDV |
| GLP1R221- | 448 | GFTFSDYG | 627 | ISHDRSNK | 806 | AKHMSMQEGAVTGEG |
| 034 | | | | | | QAVKEFIAWLVKGRVR |
| | | | | | | ADLVGDAFDV |
| GLP1R221- | 449 | GFTFSDYG | 628 | ISYDRSNE | 807 | AKHMSMQEGAVTGEG |
| 066 | | | | | | QAIKEFIAWLVKGRVR |
| | | | | | | ADLVGDAFDV |
| GLP1R221- | 450 | GFTFSDYG | 629 | ISSDENNK | 808 | AKHMSMQEGAVTGEM |
| 084 | | | | | | QAAKEFIAWLVKGRVR |
| | | | | | | ADLVGDAFDV |
| GLP1R221- | 451 | GFTFSDYG | 630 | ISDEGSNK | 809 | AKHMSMQEGAVTGAG |
| 009 | | | | | | QAAKEFIAWLVKGRVR |
| | | | | | | ADLVGDAFDV |
| GLP1R221- | 452 | GFTFSDYG | 631 | ISSDENNK | 810 | AKHMSMQEGAVTGEF |
| 072 | | | | | | QAAKEFIAWLVKGRVR |
| | | | | | | ADLVGDAFDV |
| GLP1R221- | 453 | GFTFSDYG | 632 | TSYDESN | 811 | AKHMSMQEGAVTGEY |
| 044 | | | | K | | QAAKEFIAWLVKGRVR |
| | | | | | | ADLVGDAFDV |
| GLP1R221- | 454 | GFTFSDYG | 633 | ISSDASDK | 812 | AKHMSMQEGAVTGEY |
| 012 | | | | | | QAAKEFIAWLVKGRVR |
| | | | | | | ADLVGDAFDV |
| GLP1R221- | 455 | GFTFSDYG | 634 | TSYDESN | 813 | AKHMSMQEGAVTGVG |
| 042 | | | | K | | QAAKEFIAWLVKGRVR |
| | | | | | | ADLVGDAFDV |
| GLP1R221- | 456 | GFTFSDYG | 635 | ISYEGSNK | 814 | AKHMSMQEGAVTGMG |
| 051 | | | | | | QAAKEFIAWLIKGRVR |
| | | | | | | ADLVGDAFDV |
| GLP1R221- | 457 | GFTFSDYG | 636 | ISSDASDK | 815 | AKHMSMQEGAVTGMG |
| 083 | | | | | | QAAKEFIAWLVKGRVR |
| | | | | | | ADLVGDAFDV |
| GLP1R221- | 458 | GFTFSDYG | 637 | ISYDESNE | 816 | AKHMSMQEGAVTGEH |
| 040 | | | | | | QAAKEFIAWLVKGRVR |
| | | | | | | ADLVGDAFDV |
| GLP1R221- | 459 | GFTFSDYG | 638 | ISYDRSNE | 817 | AKHMSMQEGAVHGEG |
| 052 | | | | | | QAAKEFIAWLVKGRVR |
| | | | | | | ADLVGDAFDV |
| GLP1R221- | 460 | GFTFSDYG | 639 | ISDEGSNK | 818 | AKHMSMQEGAVTGEW |
| 003 | | | | | | QAAKEFIAWLVKGRVR |
| | | | | | | ADLVGDAFDV |
| GLP1R221- | 461 | GFTFSDYG | 640 | ISSDENNK | 819 | AKHMSMQEGAVTGEF |
| 094 | | | | | | QAAKEFIAWLVKGRVR |
| | | | | | | ADLVGDAFDV |
| GLP1R221- | 462 | GFTFSDYG | 641 | ISYDASNK | 820 | AKHMSMQEGAVTGEG |
| 001 | | | | | | QAVKEFIAWLVKGRVR |
| | | | | | | ADLVGDAFDV |
| GLP1R221- | 463 | GFTFSDYG | 642 | ISSDASDK | 821 | AKHMSMQEGAVTGEW |
| 014 | | | | | | QAAKEFIAWLVKGRVR |
| | | | | | | ADLVGDAFDV |
| GLP1R221- | 464 | GFTFSDYG | 643 | ISHDRSNK | 822 | AKHMSMQEGAVTGLG |
| 085 | | | | | | QAAKEFIAWLVKGRVR |
| | | | | | | ADLVGDAFDV |
| GLP1R221- | 465 | GFTFSDYG | 644 | ISYDANN | 823 | AKHMSMQEGAVTGEG |
| 022 | | | | K | | QAAKEFIAWLIKGRVR |
| | | | | | | ADLVGDAFDV |
| GLP1R221- | 466 | GFTFSDYG | 645 | ISYEGSNQ | 824 | AKHMSMQEGAVTGIG |
| 056 | | | | | | QAAKEFIAWLVKGRVR |
| | | | | | | ADLVGDAFDV |
| GLP1R221- | 467 | GFTFSDYG | 646 | TSYDESN | 825 | AKHMSMQEGAVTGFG |
| 088 | | | | K | | QAAKEFIAWLVKGRVR |
| | | | | | | ADLVGDAFDV |
| GLP1R221- | 468 | GFTFSDYG | 647 | ISYDATNK | 826 | AKHMSMQEGAVTGMG |
| 077 | | | | | | QAAKEFIAWLVKGRVR |
| | | | | | | ADLVGDAFDV |
| GLP1R221- | 469 | GFTFSDYG | 648 | ISYHGSNK | 827 | AKHMSMQEGAVTGMG |
| 027 | | | | | | QAAKEFIAWLVKGRVR |
| | | | | | | ADLVGDAFDV |
| GLP1R221- | 470 | GFTFSDYG | 649 | ISYDASNK | 828 | AKHMSMQEGAVTGYG |
| 019 | | | | | | QAAKEFIAWLVKGRVR |
| | | | | | | ADLVGDAFDV |
| GLP1R221- | 471 | GFTFSDYG | 650 | ISSDASDK | 829 | AKHMSMQEGAVTGEF |
| 029 | | | | | | QAAKEFIAWLVKGRVR |
| | | | | | | ADLVGDAFDV |
| GLP1R221- | 472 | GFTFSDYG | 651 | TSYDESN | 830 | AKHMSMQEGAVTGGG |
| 043 | | | | K | | QAAKEFIAWLVKGRVR |
| | | | | | | ADLVGDAFDV |
| GLP1R221- | 473 | GFTFSDYG | 652 | ISSDASNK | 831 | AKHMSMQEGAVTGEG |
| 082 | | | | | | QAVKEFIAWLVKGRVR |
| | | | | | | ADLVGDAFDV |
| GLP1R221- | 474 | GFTFSDYG | 653 | ISYDANN | 832 | AKHMSMQEGAVTGEW |
| 079 | | | | K | | QAAKEFIAWLVKGRVR |
| | | | | | | ADLVGDAFDV |
| GLP1R221- | 475 | GFTFSDYG | 654 | ISHDRSNK | 833 | AKHMSMQEGAVTGPG |
| 080 | | | | | | QAAKEFIAWLVKGRVR |
| | | | | | | ADLVGDAFDV |
| GLP1R221- | 476 | GFTFSDYG | 655 | IRYGGSNK | 834 | AKHMSMQEGAVTGEG |
| 059 | | | | | | QAAKEFIAWLVKGRVR |
| | | | | | | ADLVGDAFDV |
| GLP1R221- | 477 | GFTFSDYG | 656 | ISYDATNK | 835 | AKHMSMQEGAVTGYG |
| 069 | | | | | | QAAKEFIAWLVKGRVR |
| | | | | | | ADLVGDAFDV |
| GLP1R221- | 478 | GFTFSDYG | 657 | ISDEGSNK | 836 | AKHMSMQEGAVTGMG |
| 036 | | | | | | QAAKEFIAWLVKGRVR |
| | | | | | | ADLVGDAFDV |
| GLP1R221- | 479 | GFTFSDYG | 658 | ISYEGSNQ | 837 | AKHMSMQEGAVTGWG |
| 057 | | | | | | QAAKEFIAWLVKGRVR |
| | | | | | | ADLVGDAFDV |
| GLP1R221- | 480 | GFTFSDYG | 659 | ISDEGSNK | 838 | AKHMSMQEGAVTGLG |
| 035 | | | | | | QAAKEFIAWLVKGRVR |
| | | | | | | ADLVGDAFDV |
| GLP1R221- | 481 | GFTFSDYG | 660 | ISDEGSNK | 839 | AKHMSMQEGAVTGEW |
| 063 | | | | | | QAAKEFIAWLVKGRVR |
| | | | | | | ADLVGDAFDV |
| GLP1R221- | 482 | GFTFSDYG | 661 | TSYDESN | 840 | AKHMSMQEGAVTGEW |
| 090 | | | | K | | QAAKEFIAWLVKGRVR |
| | | | | | | ADLVGDAFDV |
| GLP1R221- | 483 | GFTFSDYG | 662 | ISSDASHK | 841 | AKHMSMQEGAVTWEG |
| 002 | | | | | | QAAKEFIAWLVKGRVR |
| | | | | | | ADLVGDAFDV |
| GLP1R221- | 484 | GFTFSDYG | 663 | ISYDETNK | 842 | AKHMSMQEGAVTGFG |
| 087 | | | | | | QAAKEFIAWLVKGRVR |
| | | | | | | ADLVGDAFDV |
| GLP1R221- | 485 | GFTFSDYG | 664 | ISDEGSNK | 843 | AKHMSMQEGAVTGMG |
| 038 | | | | | | QAAKEFIAWLVKGRVR |
| | | | | | | ADLVGDAFDV |
| GLP1R221- | 486 | GFTFSDYG | 665 | ISYGGSNK | 844 | AKHMSMQEGAVTNEG |
| 060 | | | | | | QAAKEFIAWLVKGRVR |
| | | | | | | ADLVGDAFDV |
| GLP1R221- | 487 | GFTFSDYG | 666 | ISSDASHK | 845 | AKHMSMQEGAVTWEG |
| 015 | | | | | | QAAKEFIAWLVKGRVR |
| | | | | | | ADLVGDAFDV |
| GLP1R221- | 488 | GFTFSDYG | 667 | ISYDESNK | 846 | AKHMSMQEGAVTGEW |
| 020 | | | | | | QAAKEFIAWLVKGRVR |
| | | | | | | ADLVGDAFDV |
| GLP1R221- | 489 | GFTFSDYG | 668 | ISSDASDK | 847 | AKHMSMQEGAVTGGG |
| 011 | | | | | | QAAKEFIAWLVKGRVR |
| | | | | | | ADLVGDAFDV |
| GLP1R221- | 490 | GFTFSDYG | 669 | ISYGGSNK | 848 | AKHMSMQEGAVTGEW |
| 091 | | | | | | QAAKEFIAWLVKGRVR |
| | | | | | | ADLVGDAFDV |
| GLP1R221- | 491 | GFTFSDYG | 670 | TSYDESN | 849 | AKHMSMQEGAVTGEW |
| 086 | | | | K | | QAAKEFIAWLVKGRVR |
| | | | | | | ADLVGDAFDV |
| GLP1R221- | 492 | GFTFSDYG | 671 | ISHDRSNK | 850 | AKHMSMQEGAVTGEG |
| 074 | | | | | | QALKEFIAWLVKGRVR |
| | | | | | | ADLVGDAFDV |
| GLP1R221- | 493 | GFTFSDYG | 672 | ISHDRSNK | 851 | AKHMSMQEGAVTGEG |
| 032 | | | | | | QAAKDFIAWLVKGRVR |
| | | | | | | ADLVGDAFDV |
| GLP1R221- | 494 | GFTFSDYG | 673 | ISSDASDK | 852 | AKHMSMQEGAVTGWG |
| 013 | | | | | | QAAKEFIAWLVKGRVR |
| | | | | | | ADLVGDAFDV |
| GLP1R221- | 495 | GFTFSDYG | 674 | ISHDRSNK | 853 | AKHMSMQEGAVTGWG |
| 058 | | | | | | QAAKEFIAWLVKGRVR |
| | | | | | | ADLVGDAFDV |
| GLP1R221- | 496 | GFTFSDYG | 675 | ISSDASDK | 854 | AKHMSMQEGAVTGEG |
| 031 | | | | | | QALKEFIAWLVKGRVR |
| | | | | | | ADLVGDAFDV |
| GLP1R221- | 497 | GFTFSDYG | 676 | ISSDASDK | 855 | AKHMSMQEGAVTGEG |
| 054 | | | | | | WAAKEFIAWLVKGRV |
| | | | | | | RADLVGDAFDV |
| GLP1R221- | 498 | GFTFSDYG | 677 | ISYDATNK | 856 | AKHMSMQEGAVTGEG |
| 021 | | | | | | QFAKEFIAWLVKGRVR |
| | | | | | | ADLVGDAFDV |
| GLP1R221- | 499 | GFTFSDYG | 678 | ISSDASHK | 857 | AKHMSMQEGAVTWEG |
| 016 | | | | | | QAAKEFIAWLVKGRVR |
| | | | | | | ADLVGDAFDV |
| GLP1R221- | 500 | GFTFSDYG | 679 | ISSDASDK | 858 | AKHMSMQEGAVTGEG |
| 030 | | | | | | QALKEFIAWLVKGRVR |
| | | | | | | ADLVGDAFDV |
| GLP1R221- | 501 | GFTFSDYG | 680 | ISSDASDK | 859 | AKHMSMQEGAVTGEW |
| 018 | | | | | | QAAKEFIAWLVKGRVR |
| | | | | | | ADLVGDAFDV |
| GLP1R221- | 502 | GFTFSDYG | 681 | ISYDAGN | 860 | AKHMSMQEGAVTGMG |
| 028 | | | | K | | QAAKEFIAWLVKGRVR |
| | | | | | | ADLVGDAFDV |
| GLP1R221- | 503 | GFTFSDYG | 682 | TSYEESNK | 861 | AKHMSMQEGAVTGMG |
| 023 | | | | | | QAAKEFIAWLVKGRVR |
| | | | | | | ADLVGDAFDV |
| GLP1R221- | 504 | GFTFSDYG | 683 | ISHDRSNK | 862 | AKHMSMQEGAVTGIG |
| 089 | | | | | | QAAKEFIAWLVKGRVR |
| | | | | | | ADLVGDAFDV |
| GLP1R221- | 505 | GFTFSDYG | 684 | ISSDASDK | 863 | AKHMSMQEGAVTGWG |
| 053 | | | | | | QAAKEFIAWLVKGRVR |
| | | | | | | ADLVGDAFDV |
| GLP1R221- | 506 | GFTFSDYG | 685 | ISSDENNK | 864 | AKHMSMQEGAVTGIG |
| 071 | | | | | | QAAKEFIAWLVKGRVR |
| | | | | | | ADLVGDAFDV |
| GLP1R221- | 507 | GFTFSDYG | 686 | ISYGGSNK | 865 | AKHMSMQEGAVTGWG |
| 055 | | | | | | QAAKEFIAWLVKGRVR |
| | | | | | | ADLVGDAFDV |
| GLP1R221- | 508 | GFTFSDYG | 687 | ISSDASNK | 866 | AKHMSMQEGAVTGMG |
| 046 | | | | | | QAAKEFIAWLVKGRVR |
| | | | | | | ADLVGDAFDV |
| GLP1R221- | 509 | GFTFSDYG | 688 | IRYDESNK | 867 | AKHMSMQEGAVTGEG |
| 039 | | | | | | QALKEFIAWLVKGRVR |
| | | | | | | ADLVGDAFDV |
| GLP1R221- | 510 | GFTFSDYG | 689 | ISSDASNK | 868 | AKHMSMQEGAVMGEG |
| 078 | | | | | | QAAKEFIAWLVKGRVR |
| | | | | | | ADLVGDAFDV |
| GLP1R221- | 511 | GFTFSDYG | 690 | ISSDASDK | 869 | AKHMSMQEGAVTGIG |
| 010 | | | | | | QAAKEFIAWLVKGRVR |
| | | | | | | ADLVGDAFDV |
| GLP1R221- | 512 | GFTFSDYG | 691 | ISDEGSNK | 870 | AKHMSMQEGAVTGLG |
| 005 | | | | | | QAAKEFIAWLVKGRVR |
| | | | | | | ADLVGDAFDV |
| GLP1R221- | 513 | GFTFSDYG | 692 | ISHDRSNK | 871 | AKHMSMQEGAVTGFG |
| 073 | | | | | | QAAKEFIAWLVKGRVR |
| | | | | | | ADLVGDAFDV |
| GLP1R221- | 514 | GFTFSDYG | 693 | ISYDETNK | 872 | AKHMSMQEGAVTGIG |
| 041 | | | | | | QAAKEFIAWLVKGRVR |
| | | | | | | ADLVGDAFDV |
| GLP1R221- | 515 | GFTFSDYG | 694 | ISYDESNK | 873 | AKHMSMQEGAVTEEG |
| 025 | | | | | | QAAKEFIAWLVKGRVR |
| | | | | | | ADLVGDAFDV |
| GLP1R221- | 516 | GFTFSDYG | 695 | ISDEGSNK | 874 | AKHMSMQEGAVTGWG |
| 007 | | | | | | QAAKEFIAWLVKGRVR |
| | | | | | | ADLVGDAFDV |
| GLP1R221- | 517 | GFTFSDYG | 696 | ISYDESNK | 875 | AKHMSMQEGAVTGFG |
| 093 | | | | | | QAAKEFIAWLVKGRVR |
| | | | | | | ADLVGDAFDV |
| GLP1R221- | 518 | GFTFSDYG | 697 | ISYDAGN | 876 | AKHMSMQEGAVTGEG |
| 024 | | | | K | | QAVKEFIAWLVKGDVR |
| | | | | | | ADLVGDAFDV |
| GLP1R221- | 519 | GFTFSDYG | 698 | ISDEGSNK | 877 | AKHMSMQEGAVTGLG |
| 008 | | | | | | QAAKEFIAWLVKGRVR |
| | | | | | | ADLVGDAFDV |
| GLP1R221- | 520 | GFTFSDYG | 699 | ISYDENNK | 878 | AKHMSMQEGAVTGMG |
| 050 | | | | | | QAAKEFIAWLVKGRVR |
| | | | | | | ADLVGDAFDV |
| GLP1R221- | 521 | GFTFSDYG | 700 | TSYDESN | 879 | AKHMSMQEGAVTGWG |
| 062 | | | | K | | QAAKEFIAWLVKGRVR |
| | | | | | | ADLVGDAFDV |
| GLP1R221- | 522 | GFTFSDYG | 701 | ISYDAGN | 880 | AKHMSMQEGAVTGFG |
| 068 | | | | K | | QAAKEFIAWLVKGRVR |
| | | | | | | ADLVGDAFDV |
| GLP1R221- | 523 | GFTFSDYG | 702 | ISNDENNK | 881 | AKHMSMQEGAVTGFG |
| 067 | | | | | | QAAKEFIAWLVKGRVR |
| | | | | | | ADLVGDAFDV |
| GLP1R221- | 524 | GFTFSDYG | 703 | TSYDESN | 882 | AKHMSMQEGAVTGWG |
| 061 | | | | K | | QAAKEFIAWLVKGRVR |
| | | | | | | ADLVGDAFDV |
| GLP1R221- | 525 | GFTFSDYG | 704 | ISDEGSNK | 883 | AKHMSMQEGAVTGYG |
| 064 | | | | | | QAAKEFIAWLVKGRVR |
| | | | | | | ADLVGDAFDV |
| GLP1R221- | 526 | GFTFSDYG | 705 | ISYDATNK | 884 | AKHMSMQEGAVTGIG |
| 070 | | | | | | QAAKEFIAWLVKGRVR |
| | | | | | | ADLVGDAFDV |
| GLP1R221- | 527 | GFTFSDYG | 706 | ISDEGSNK | 885 | AKHMSMQEGAVTGFG |
| 006 | | | | | | QAAKEFIAWLVKGRVR |
| | | | | | | ADLVGDAFDV |
| GLP1R221- | 528 | GFTFSDYG | 707 | ISSDASNK | 886 | AKHMSMQEGAVTGEG |
| 045 | | | | | | QAAKEFIAWLVFGRVR |
| | | | | | | ADLVGDAFDV |
| GLP1R221- | 529 | GFTFSDYG | 708 | ISDEGSNK | 887 | AKHMSMQEGAVTGFG |
| 004 | | | | | | QAAKEFIAWLVKGRVR |
| | | | | | | ADLVGDAFDV |
| GLP1R221- | 530 | GFTFSDYG | 709 | ISSDASDK | 888 | AKHMSMQEGAVTGEG |
| 047 | | | | | | QAWKEFIAWLVKGRV |
| | | | | | | RADLVGDAFDV |
| GLP1R221- | 531 | GFTFSDYG | 710 | ISSDASDK | 889 | AKHMSMQEGAVTGEY |
| 048 | | | | | | QAAKEFIAWLVKGRVR |
| | | | | | | ADLVGDAFDV |
| GLP1R-222- | 532 | GFTFNNYP | 711 | ISYDESNK | 890 | AKHMSMQEGAVTGGG |
| 052 | | | | | | QAAKEFIAWLVKGRVR |
| | | | | | | ADLVGDAFDV |
| GLP1R-222- | 533 | GFTFNNY | 712 | ISDEGSNK | 891 | AKHMSMQEGAVTGEY |
| 016 | | A | | | | QAAKEFIAWLVKGRVR |
| | | | | | | ADLVGDAFDV |
| GLP1R-222- | 534 | GFSFSDYG | 713 | ISYDANN | 892 | AKHMSMQEGAVTGEW |
| 023 | | | | K | | QAAKEFIAWLVKGRVR |
| | | | | | | ADLVGDAFDV |
| GLP1R-222- | 535 | GFAFSNY | 714 | ISYDESNK | 893 | AKHMSMQEGAVTGEW |
| 014 | | G | | | | QAAKEFIAWLVKGRVR |
| | | | | | | ADLVGDAFDV |
| GLP1R-222- | 536 | GFSFSDYG | 715 | ISYEGSNK | 894 | AKHMSMQEGAVTGEK |
| 090 | | | | | | QAAKEFIAWLVKGRVR |
| | | | | | | ADLVGDAFDV |
| GLP1R-222- | 537 | GFTFRDY | 716 | IRYDEINK | 895 | AKHMSMQEGAVTGEG |
| 073 | | G | | | | QAAKEFIAWLVGGRVR |
| | | | | | | ADLVGDAFDV |
| GLP1R-222- | 538 | GFTFNNY | 717 | ISDEGSNK | 896 | AKHMSMQEGAVTGVG |
| 012 | | G | | | | QAAKEFIAWLVKGRVR |
| | | | | | | ADLVGDAFDV |
| GLP1R-222- | 539 | GFTFSAYS | 718 | ISYDATNK | 897 | AKHMSMQEGAVTGEF |
| 082 | | | | | | QAAKEFIAWLVKGRVR |
| | | | | | | ADLVGDAFDV |
| GLP1R-222- | 540 | GFTFDNY | 719 | ISYDAGN | 898 | AKHMSMQEGAVTGEG |
| 081 | | A | | K | | QAAKEFIAWLVKGFVR |
| | | | | | | ADLVGDAFDV |
| GLP1R-222- | 541 | GFPFSSYA | 720 | ISYDRSNK | 899 | AKHMSMQEGAVTGYG |
| 056 | | | | | | QAAKEFIAWLVKGFVR |
| | | | | | | ADLVGDAFDV |
| GLP1R-222- | 542 | GFTFRDY | 721 | ISFDESNK | 900 | AKHMSMQEGAVTGEW |
| 058 | | A | | | | QAAKEFIAWLVKGRVR |
| | | | | | | ADLVGDAFDV |
| GLP1R-222- | 543 | GFTFNNYP | 722 | ISHDRSNK | 901 | AKHMSMQEGAVTGTG |
| 063 | | | | | | QAAKEFIAWLVKGIVR |
| | | | | | | ADLVGDAFDV |
| GLP1R-222- | 544 | GLTFSNY | 723 | TSYDESN | 902 | AKHMSMQEGAVTREG |
| 042 | | A | | K | | QAAKEFIAWLVKGRVR |
| | | | | | | ADLVGDAFDV |
| GLP1R-222- | 545 | GFTFGSYA | 724 | TSYDESN | 903 | AKHMSMQEGAVTGEG |
| 092 | | | | K | | QAAKEFIAWLVMGRVR |
| | | | | | | ADLVGDAFDV |
| GLP1R-222- | 546 | GFTFSSYG | 725 | ISSDASDK | 904 | AKHMSMQEGAVTGEG |
| 007 | | | | | | QAAKEFIAWLVKGWV |
| | | | | | | RADLVGDAFDV |
| GLP1R-222- | 547 | GFNFNNY | 726 | ISYDASNK | 905 | AKHMSMQEGAVTGEF |
| 008 | | G | | | | QAAKEFIAWLVKGRVR |
| | | | | | | ADLVGDAFDV |
| GLP1R-222- | 548 | GFTSSSYA | 727 | ISDEGSNK | 906 | AKHMSMQEGAVTGEG |
| 024 | | | | | | QAAKEFIAWLVKGRVR |
| | | | | | | ADLVGDAFDV |
| GLP1R-222- | 549 | GFTFSDYP | 728 | ISYDESNK | 907 | AKHMSMQEGAVTGEG |
| 062 | | | | | | QAAKEFIAWLVKGRVR |
| | | | | | | NDLVGDAFDV |
| GLP1R-222- | 550 | GFTFGNY | 729 | ISYDASNK | 908 | AKHMSMQEGAVTGEF |
| 077 | | G | | | | QAAKEFIAWLVKGRVR |
| | | | | | | ADLVGDAFDV |
| GLP1R-222- | 551 | GFTFNNY | 730 | ISYAGSNE | 909 | AKHMSMQEGAVTGEG |
| 064 | | A | | | | QALKEFIAWLVKGRVR |
| | | | | | | ADLVGDAFDV |
| GLP1R-222- | 552 | GFSFRSYG | 731 | ISSDASNK | 910 | AKHMSMQEGAQTGEG |
| 074 | | | | | | QAAKEFIAWLVKGRVR |
| | | | | | | ADLVGDAFDV |
| GLP1R-222- | 553 | GFSFSNYA | 732 | TSYDESN | 911 | AKHMSMQEGAVTGEG |
| 029 | | | | K | | QAAKEFIAWLLKGRVR |
| | | | | | | ADLVGDAFDV |
| GLP1R-222- | 554 | GFAFSSYA | 733 | ISYDENNK | 912 | AKHMSMQEGAVTGYG |
| 046 | | | | | | QAAKEFIAWLVKGRVR |
| | | | | | | ADLVGDAFDV |
| GLP1R-222- | 555 | GFTFNNYP | 734 | IWSDASQ | 913 | AKHMSMQEGAVTGEG |
| 005 | | | | K | | WAAKEFIAWLVKGRV |
| | | | | | | RADLVGDAFDV |
| GLP1R-222- | 556 | GFTFGNY | 735 | ISSDASDK | 914 | AKHMSMQEGAVTGEW |
| 004 | | A | | | | QAAKEFIAWLVKGRVR |
| | | | | | | ADLVGDAFDV |
| GLP1R-222- | 557 | GFAFSNY | 736 | ISYDASNK | 915 | AKHMSMQEGAVTGEG |
| 022 | | G | | | | QAAKNFIAWLVKGRVR |
| | | | | | | ADLVGDAFDV |
| GLP1R-222- | 558 | GFTFSNYA | 737 | ISYDASNK | 916 | AKHMSMQEGAVTGYG |
| 087 | | | | | | QAAKEFIAWLVKGRVR |
| | | | | | | ADLVGDAFDV |
| GLP1R-222- | 559 | GFSFGSYA | 738 | TSYDESN | 917 | AKHMSMQEGAVTGEW |
| 048 | | | | K | | QAAKEFIAWLVKGRVR |
| | | | | | | ADLVGDAFDV |
| GLP1R-222- | 560 | GFTFSSYP | 739 | ISYEGTNK | 918 | AKHMSMQEGAVTGEG |
| 072 | | | | | | QAAKDFIAWLVKGRVR |
| | | | | | | ADLVGDAFDV |
| GLP1R-222- | 561 | GFSFSNYA | 740 | ISYDESNE | 919 | AKHMSMQEGAVTGEG |
| 089 | | | | | | QAAKEFIAWLVKGDVR |
| | | | | | | ADLVGDAFDV |
| GLP1R-222- | 562 | GFSFSSYG | 741 | ISYGGSNK | 920 | AKHMSMQEGAVTGEW |
| 083 | | | | | | QAAKEFIAWLVKGRVR |
| | | | | | | ADLVGDAFDV |
| GLP1R-222- | 563 | GFSFSNYA | 742 | TSYDESN | 921 | AKHMSMQEGAVTGEG |
| 001 | | | | K | | QAAKEFIAWLLKGRVR |
| | | | | | | ADLVGDAFDV |
| GLP1R-222- | 564 | GFTFSDYG | 743 | ISYDESNK | 922 | AKHMSMQEGAVTGEG |
| 075 | | | | | | WAAKEFIAWLVKGRV |
| | | | | | | RADLVGDAFDV |
| GLP1R-222- | 565 | GFTFSDFA | 744 | ISYEGSNK | 923 | AKHMSMQEGAVQGEG |
| 071 | | | | | | QAAKEFIAWLVKGRVR |
| | | | | | | ADLVGDAFDV |
| GLP1R-222- | 566 | GFTFSDYP | 745 | ISDEGSNK | 924 | AKHMSMQEGAVTGEIQ |
| 069 | | | | | | AAKEFIAWLVKGRVRA |
| | | | | | | DLVGDAFDV |
| GLP1R-222- | 567 | GFTFRDY | 746 | ISYDATNK | 925 | AKHMSMQEGAVTGMG |
| 002 | | A | | | | QAAKEFIAWLVKGRVR |
| | | | | | | ADLVGDAFDV |
| GLP1R-222- | 568 | GFTFNRY | 747 | ISYDASNK | 926 | AKHMSMQEGAVTGEG |
| 006 | | G | | | | QAAWEFIAWLVKGRV |
| | | | | | | RADLVGDAFDV |
| GLP1R-222- | 569 | GFPFSSYG | 748 | ISYDATNK | 927 | AKHMSMQEGAVTGEG |
| 055 | | | | | | QAAKSFIAWLVKGRVR |
| | | | | | | ADLVGDAFDV |
| GLP1R-222- | 570 | GFSFGSYA | 749 | ISYDASNK | 928 | AKHMSMQEGAVTGMG |
| 027 | | | | | | QAAKEFIAWLVKGRVR |
| | | | | | | ADLVGDAFDV |
| GLP1R-222- | 571 | GFTFSNYD | 750 | ISYAGSNK | 929 | AKHMSMQEGAVTGTG |
| 066 | | | | | | QAAKEFIAWLVKGRVR |
| | | | | | | ADLVGDAFDV |
| GLP1R-222- | 572 | GFSFRTYG | 751 | ISDEGSNK | 930 | AKHMSMQEGAVTGEG |
| 015 | | | | | | YAAKEFIAWLVKGRVR |
| | | | | | | ADLVGDAFDV |
| GLP1R-222- | 573 | GFTFSTYG | 752 | ISYDANN | 931 | AKHMSMQEGAVTGEG |
| 076 | | | | K | | QAAVEFIAWLVKGRVR |
| | | | | | | ADLVGDAFDV |
| GLP1R-222- | 574 | GFSFSDYA | 753 | ISSDASNK | 932 | AKHMSMQEGAVTGYG |
| 011 | | | | | | QAAKEFIAWLVKGRVR |
| | | | | | | ADLVGDAFDV |
| GLP1R-222- | 575 | GFTFSNYA | 754 | ISYDATNK | 933 | AKHMSMQEGAVTGEA |
| 065 | | | | | | QAAKEFIAWLVKGRVR |
| | | | | | | ADLVGDAFDV |
| GLP1R-222- | 576 | GFTFSNYD | 755 | TSYDESK | 934 | AKHMSMQEGAVTGKG |
| 041 | | | | K | | QAAKEFIAWLVKGRVR |
| | | | | | | ADLVGDAFDV |
| GLP1R-222- | 577 | GFSFSNYA | 756 | TSYDESN | 935 | AKHMSMQEGAVTGEG |
| 028 | | | | K | | QAAYEFIAWLVKGRVR |
| | | | | | | ADLVGDAFDV |
| GLP1R-222- | 578 | GFTFSDYP | 757 | ISYAGSNE | 936 | AKHMSMQEGAVTGYG |
| 086 | | | | | | QAAKEFIAWLVKGRVR |
| | | | | | | ADLVGDAFDV |
| GLP1R-222- | 579 | GFPFSSYA | 758 | ISYDANN | 937 | AKHMSMQEGAVTGYG |
| 033 | | | | K | | QAAKEFIAWLVKGRVR |
| | | | | | | ADLVGDAFDV |
| GLP1R-222- | 580 | GFAFSSYA | 759 | ISYDESNK | 938 | AKHMSMQEGAVTGEG |
| 035 | | | | | | WAAKEFIFWLVKGRVR |
| | | | | | | ADLVGDAFDV |
| GLP1R-222- | 581 | GFSFSNYA | 760 | ISFDESNK | 939 | AKHMSMQEGAVTGYG |
| 045 | | | | | | QAAKEFIAWLVKGRVR |
| | | | | | | ADLVGDAFDV |
| GLP1R-222- | 582 | GFTFSDYP | 761 | ISYDRSNE | 940 | AKHMSMQEGAVTGTG |
| 085 | | | | | | QAAKEFIAWLVKGRVR |
| | | | | | | ADLVGDAFDV |
| GLP1R-222- | 583 | GFSFSNYG | 762 | ISSDASNK | 941 | AKHMSMQEGAVTGEW |
| 049 | | | | | | QAAKEFIAWLVKGRVR |
| | | | | | | ADLVGDAFDV |
| GLP1R-222- | 584 | GFSFRNY | 763 | ISYDESNK | 942 | AKHMSMQEGAVTGEG |
| 078 | | G | | | | QAAKEFIAWLVKGRVR |
| | | | | | | PDLVGDAFDV |
| GLP1R-222- | 585 | GFTFNDY | 764 | ISSDASNK | 943 | AKHMSMQEGAVTGTG |
| 021 | | G | | | | QAAKEFIAWLVKGRVR |
| | | | | | | ADLVGDAFDV |
| GLP1R-222- | 586 | GFTFGNY | 765 | ISSDASNK | 944 | AKHMSMQEGAVTGEF |
| 009 | | A | | | | QAAKEFIAWLVKGRVR |
| | | | | | | ADLVGDAFDV |
| GLP1R-222- | 587 | GFTFTNY | 766 | ISSDASDK | 945 | AKHMSMQEGAVTGMG |
| 036 | | G | | | | QAAKEFIAWLVKGRVR |
| | | | | | | ADLVGDAFDV |
| GLP1R-222- | 588 | GFSFSNYG | 767 | ISYGGSNK | 946 | AKHMSMQEGAVTGEG |
| 084 | | | | | | FAAKEFIAWLVKGRVR |
| | | | | | | ADLVGDAFDV |
| GLP1R-222- | 589 | GFTFSDYP | 768 | ISSDASDK | 947 | AKHMSMQEGAVTGEG |
| 010 | | | | | | QAAKEFIAWLVKGWV |
| | | | | | | RADLVGDAFDV |
| GLP1R-222- | 590 | GFSFSNYA | 769 | ISYDASNK | 948 | AKHMSMQEGAVTGGG |
| 088 | | | | | | QAAKEFIAWLVKGRVR |
| | | | | | | ADLVGDAFDV |
| GLP1R-222- | 591 | GFPFSNYA | 770 | ISSDASNK | 949 | AKHMSMQEGAVTGEW |
| 079 | | | | | | QAAKEFIAWLVKGRVR |
| | | | | | | ADLVGDAFDV |
| GLP1R-222- | 592 | GFSFSDYG | 771 | ISYDANN | 950 | AKHMSMQEGAVTGLG |
| 040 | | | | K | | QAAKEFIAWLVKGRVR |
| | | | | | | ADLVGDAFDV |
| GLP1R-222- | 593 | GFTFGSYG | 772 | ISDEGSNK | 951 | AKHMSMQEGAVTNEG |
| 070 | | | | | | QAAKEFIAWLVKGRVR |
| | | | | | | ADLVGDAFDV |
| GLP1R-222- | 594 | GFTFNDY | 773 | ISSDENNK | 952 | AKHMSMQEGAVTGEG |
| 032 | | G | | | | QWAKEFIAWLVKGRV |
| | | | | | | RADLVGDAFDV |
| GLP1R-222- | 595 | GFTFRDY | 774 | ISSDENNK | 953 | AKHMSMQEGAVTGWG |
| 030 | | G | | | | QAAKEFIAWLVKGRVR |
| | | | | | | ADLVGDAFDV |
| GLP1R-222- | 596 | GFTFGNY | 775 | ISSDASHK | 954 | AKHMSMQEGAVTWEG |
| 038 | | G | | | | QAAKEFIAWLVKGRVR |
| | | | | | | ADLVGDAFDV |
| GLP1R-222- | 597 | GFTFSGYA | 776 | ISSDENNK | 955 | AKHMSMQEGAVTGWG |
| 031 | | | | | | QAAKEFIAWLVKGRVR |
| | | | | | | ADLVGDAFDV |
| GLP1R-222- | 598 | GFTFSNYA | 777 | ISDEGSNK | 956 | AKHMSMQEGAVTGAG |
| 026 | | | | | | QAAKEFIAWLVKGRVR |
| | | | | | | ADLVGDAFDV |
| GLP1R-222- | 599 | GFNFNNY | 778 | ISYDESNK | 957 | AKHMSMQEGAVTGEW |
| 054 | | G | | | | QAAKEFIAWLVKGRVR |
| | | | | | | ADLVGDAFDV |
| GLP1R-222- | 600 | GFTFSDYP | 779 | ISSDASDK | 958 | AKHMSMQEGAVTGHG |
| 093 | | | | | | QAAKEFIAWLVKGRVR |
| | | | | | | ADLVGDAFDV |
| GLP1R-222- | 601 | GFTFNNYP | 780 | ISYGGSDK | 959 | AKHMSMQEGAVTGEG |
| 051 | | | | | | WAAKEFIAWLVKGRV |
| | | | | | | RADLVGDAFDV |
| GLP1R-222- | 602 | GFTFSDYA | 781 | IPYDESNK | 960 | AKHMSMQEGAVTGEG |
| 067 | | | | | | QAAKNFIAWLVKGRVR |
| | | | | | | ADLVGDAFDV |
| GLP1R-222- | 603 | GFAFSNY | 782 | ISDEGSNK | 961 | AKHMSMQEGAVTGHG |
| 059 | | G | | | | QAAKEFIAWLVKGRVR |
| | | | | | | ADLVGDAFDV |
| GLP1R-222- | 604 | GFTFNRY | 783 | ISDEGSNK | 962 | AKHMSMQEGAVTGVG |
| 025 | | G | | | | QAAKEFIAWLVKGRVR |
| | | | | | | ADLVGDAFDV |
| GLP1R-222- | 605 | GFIFSNYA | 784 | ISYDASNK | 963 | AKHMSMQEGAVTGEY |
| 068 | | | | | | QAAKEFIAWLVKGRVR |
| | | | | | | ADLVGDAFDV |
| GLP1R-222- | 606 | GFNFNNY | 785 | ISSDASNK | 964 | AKHMSMQEGAVTGEG |
| 053 | | G | | | | QAVKEFIAWLVKGRVR |
| | | | | | | ADLVGDAFDV |
| GLP1R-222- | 607 | GFTFGSYG | 786 | ISSDENNK | 965 | AKHMSMQEGAVTGEG |
| 018 | | | | | | FAAKEFIAWLVKGRVR |
| | | | | | | ADLVGDAFDV |
| GLP1R-222- | 608 | GFTFGSYA | 787 | TSYDESN | 966 | AKHMSMQEGAVTGYG |
| 047 | | | | K | | QAAKEFIAWLVKGRVR |
| | | | | | | ADLVGDAFDV |
| GLP1R-222- | 609 | GFTFSNYD | 788 | ISDEGSNK | 967 | AKHMSMQEGAVTGEG |
| 060 | | | | | | WAAKEFIAWLVKGRV |
| | | | | | | RADLVGDAFDV |
| GLP1R-222- | 610 | GFTFKNY | 789 | ISYGGSNK | 968 | AKHMSMQEGAVTGEG |
| 020 | | G | | | | PAAKEFIAWLVKGRVR |
| | | | | | | ADLVGDAFDV |
| GLP1R-222- | 611 | GFSFSDYA | 790 | ISDDGSNK | 969 | AKHMSMQEGAVTGEG |
| 044 | | | | | | QAAKEFIAWLVKGFVR |
| | | | | | | ADLVGDAFDV |
| GLP1R-222- | 612 | GFSFSDYG | 791 | ISSDASDK | 970 | AKHMSMQEGAVTGEG |
| 080 | | | | | | QALKEFIAWLVKGRVR |
| | | | | | | ADLVGDAFDV |
| GLP1R-222- | 613 | GFTFGSYG | 792 | ISSDENNK | 971 | AKHMSMQEGAVTGMG |
| 057 | | | | | | QAAKEFIAWLVKGRVR |
| | | | | | | ADLVGDAFDV |
| GLP1R-222- | 614 | GFTLSNY | 793 | IPYDESNK | 972 | AKHMSMQEGAVTGVG |
| 043 | | A | | | | QAAKEFIAWLVKGRVR |
| | | | | | | ADLVGDAFDV |
| GLP1R-222- | 615 | GFTFSNFA | 794 | ISSDASNK | 973 | AKHMSMQEGAVTGEG |
| 003 | | | | | | QSAKEFIAWLVKGRVR |
| | | | | | | ADLVGDAFDV |
| GLP1R-222- | 616 | GFTFRNFG | 795 | ISSDASNK | 974 | AKHMSMQEGAVTGIG |
| 037 | | | | | | QAAKEFIAWLVKGRVR |
| | | | | | | ADLVGDAFDV |
| GLP1R-222- | 617 | GFTFGSHG | 796 | ISSDENNK | 975 | AKHMSMQEGAVTGEG |
| 091 | | | | | | QAIKEFIAWLVKGRVR |
| | | | | | | ADLVGDAFDV |
| GLP1R-222- | 618 | GFNFNNY | 797 | ISDEGSNK | 976 | AKHMSMQEGAVTGEG |
| 019 | | G | | | | QAAKEFIAWLVKGRVR |
| | | | | | | PDLVGDAFDV |
| GLP1R-222- | 619 | GFTFGSYG | 798 | ISYDASNK | 977 | AKHMSMQEGAVTGWG |
| 094 | | | | | | QAAKEFIAWLVKGRVR |
| | | | | | | ADLVGDAFDV |

TABLE 13
Variable Light Chain CDRs

| | SEQ ID | | SEQ ID | | SEQ ID | |
|---|---|---|---|---|---|---|
| Variant | NO | CDR1 | NO | CDR2 | NO | CDR3 |
| GLP1R-3 | 978 | SSNIADNY | 1157 | DNN | 1336 | GTWDNYLGAGV |
| GLP1R221-065 | 979 | TSNIANNF | 1158 | DHN | 1337 | GTWDTSLSAGA |
| GLP1R221-075 | 980 | GSNIGNND | 1159 | DND | 1338 | GTWDTSLSNYV |
| GLP1R221-017 | 981 | SSNIGNTY | 1160 | DDY | 1339 | ATWDATLNTGV |
| GLP1R221-033 | 982 | SSNIGNEY | 1161 | DNN | 1340 | ATWDTSLNVGV |
| GLP1R221-076 | 983 | SSNIGNND | 1162 | ENN | 1341 | LTWDHSLTAYV |
| GLP1R221-092 | 984 | TSNIANNF | 1163 | DNN | 1342 | GTWDTSLSVGM |
| GLP1R221-034 | 985 | SSNIGNNP | 1164 | END | 1343 | ATWDRGLSTGV |
| GLP1R221-066 | 986 | SSNIGNNY | 1165 | ENN | 1344 | GIWDRSLSAWV |
| GLP1R221-084 | 987 | SSNIADNY | 1166 | ENN | 1345 | GTWDVSLSVGM |
| GLP1R221-009 | 988 | SSNIGNQY | 1167 | DDH | 1346 | GTWDTSLSVGE |
| GLP1R221-072 | 989 | SSNIGRNF | 1168 | DHN | 1347 | GTWDVTLHTGV |
| GLP1R221-044 | 990 | SSNIGNND | 1169 | DNN | 1515 | GTWDTSLSGGV |
| GLP1R221-012 | 991 | SSTIGNNY | 1170 | EDD | 1516 | ATWDRGLSTGV |
| GLP1R221-042 | 992 | SSNIGNKY | 1171 | DDD | 1517 | GTWDTSLSVGM |
| GLP1R221-051 | 993 | SSNIGNDY | 1172 | DNN | 1518 | GTWDRGPNTGV |
| GLP1R221-083 | 994 | SSNIGSKD | 1173 | DDD | 1519 | GTWDRSLGGWV |
| GLP1R221-040 | 995 | SSNIGDND | 1174 | DNN | 1353 | GTWDRSLNVGV |
| GLP1R221-052 | 996 | SSNIGSKY | 1175 | DNN | 1354 | GTWDRGPNTGV |
| GLP1R221-003 | 997 | SSNIGNNP | 1176 | DND | 1355 | ATWDHSLRVGV |
| GLP1R221-094 | 998 | SSNIGNKY | 1177 | DNN | 1356 | GTWDTALTAGV |
| GLP1R221-001 | 999 | SSNIGSHY | 1178 | DTN | 1357 | ATWDRGLSTGV |
| GLP1R221-014 | 1000 | SSTIGNNY | 1179 | DND | 1358 | ATWDTSLNVGV |
| GLP1R221-085 | 1001 | TSNIGNNH | 1180 | DNN | 1359 | GTWDRSLSSAV |
| GLP1R221-022 | 1002 | SSNIGSNY | 1181 | DNN | 1360 | GTWDTSVSAGV |
| GLP1R221-056 | 1003 | GSNIGNND | 1182 | DTN | 1361 | ATWDRTLSIGV |
| GLP1R221-088 | 1004 | SSNIGSKY | 1183 | DNN | 1362 | GTWDTTLNIGV |
| GLP1R221-077 | 1005 | SSNIGNND | 1184 | GDD | 1363 | ATWDRSLRAGV |
| GLP1R221-027 | 1006 | SSNIGNDF | 1185 | DNN | 1364 | GTWDTSLSTGV |
| GLP1R221-019 | 1007 | SSNIGNNF | 1186 | DNN | 1365 | GTWETSLSAGV |
| GLP1R221-029 | 1008 | SSNIGNND | 1187 | EDN | 1366 | GTWVTSLSAGV |
| GLP1R221-043 | 1009 | SSNIGNHD | 1188 | DNN | 1367 | GTWDRSLSGEV |
| GLP1R221-082 | 1010 | SSNIGSNF | 1189 | DDK | 1368 | ATWDRGLSTGV |
| GLP1R221-079 | 1011 | SSNIGDND | 1190 | DND | 1369 | ATWDRSLSAVV |
| GLP1R221-080 | 1012 | SSNIGNND | 1191 | DDD | 1370 | GTWDKSLSAVV |
| GLP1R221-059 | 1013 | SSNIGDND | 1192 | ENN | 1371 | GTWDTSLSGGV |
| GLP1R221-069 | 1014 | SSNIGKNF | 1193 | DNN | 1372 | GTWDVTLHTGV |
| GLP1R221-036 | 1015 | SSNIGNEY | 1194 | ENK | 1373 | GTWDASLSAGL |
| GLP1R221-057 | 1016 | SSNIGSKY | 1195 | DNN | 1374 | GTWESSLSAGV |
| GLP1R221-035 | 1017 | SSDIGNKY | 1196 | ENN | 1375 | ATWDASLSGGV |
| GLP1R221-063 | 1018 | SSNIGNNF | 1197 | ENN | 1376 | ATWDATLNTGV |
| GLP1R221-090 | 1019 | SSNIGSNY | 1198 | DTD | 1377 | GTWDVSLNTQV |
| GLP1R221-002 | 1020 | SSNIGNKY | 1199 | DTN | 1378 | ATWDATLNTGV |
| GLP1R221-087 | 1021 | SSNIGKDY | 1200 | ENV | 1379 | GTWDASLSGVV |
| GLP1R221-038 | 1022 | TSNIGNND | 1201 | DNN | 1380 | GTWDVTLHTGV |
| GLP1R221-060 | 1023 | GSNIGNND | 1202 | ETN | 1381 | GTWDTGLSAGV |
| GLP1R221-015 | 1024 | TSNIGNNY | 1203 | DTN | 1382 | ATWDATLNTGV |
| GLP1R221-020 | 1025 | SSNIGRNF | 1204 | DNN | 1383 | GTWDTSLSRYV |
| GLP1R221-011 | 1026 | SSNIGKDY | 1205 | DNY | 1384 | GTWDTSLSVGV |
| GLP1R221-091 | 1027 | SSNIGSND | 1206 | VND | 1385 | GAWDRSLSAYV |
| GLP1R221-086 | 1028 | SSNIGKHY | 1207 | DVD | 1386 | ATWDRGLSTGV |
| GLP1R221-074 | 1029 | SSNIGSNY | 1208 | DNN | 1387 | GTWDTRLSVGV |
| GLP1R221-032 | 1030 | SSNIGNNY | 1209 | DNN | 1388 | ATWDRSLRAGV |
| GLP1R221-013 | 1031 | SSNIGNKY | 1210 | DDD | 1389 | ATWDTSLNVGV |
| GLP1R221-058 | 1032 | SSNIGKYY | 1211 | DNN | 1390 | GTWDTSLATGL |
| GLP1R221-031 | 1033 | SSNIGSNL | 1212 | DNN | 1391 | GTWDTSLSAGA |
| GLP1R221-054 | 1034 | RSNIGNYY | 1213 | DHN | 1392 | ATWDRTLSIGV |
| GLP1R221-021 | 1035 | SSNIGNNF | 1214 | DNN | 1393 | GAWDRSLSAGV |
| GLP1R221-016 | 1036 | SSNIGNKY | 1215 | DND | 1394 | ATWDATLNTGV |
| GLP1R221-030 | 1037 | SSNIENND | 1216 | ENN | 1395 | GTWDRSLSAAL |
| GLP1R221-018 | 1038 | SSNIGSNH | 1217 | ENT | 1396 | ATWDATLNTGV |
| GLP1R221-028 | 1039 | SSTIGNNY | 1218 | DND | 1397 | GTWDKSLSAGV |
| GLP1R221-023 | 1040 | SSNIGSKD | 1219 | DTN | 1398 | ATWDRGLSTGV |
| GLP1R221-089 | 1041 | SSNIGKDF | 1220 | DND | 1399 | ATWDTSLSAEV |
| GLP1R221-053 | 1042 | SSNIGKDY | 1221 | EDN | 1400 | ATWDRTLSIGV |
| GLP1R221-071 | 1043 | SSNIGSNY | 1222 | DDN | 1401 | GTWGSSLSAGL |
| GLP1R221-055 | 1044 | SSNIGSND | 1223 | DKN | 1402 | GAWDRSLSAGV |
| GLP1R221-046 | 1045 | SSNIGNND | 1224 | DDD | 1403 | AAWDDYLSAVV |
| GLP1R221-039 | 1046 | SSNIGNHF | 1225 | DNN | 1404 | GTWDRSLNVGV |
| GLP1R221-078 | 1047 | SSNIGNNP | 1226 | ENI | 1405 | ATWDRSLRAGV |
| GLP1R221-010 | 1048 | SSTIGNNY | 1227 | DNN | 1406 | GTWDASLSVWV |
| GLP1R221-005 | 1049 | SSTIGNNY | 1228 | ENR | 1407 | GTWDNYLGAGV |
| GLP1R221-073 | 1050 | SSNIGSNH | 1229 | END | 1408 | GTWDTSLSAYI |
| GLP1R221-041 | 1051 | SSNIGSKY | 1230 | NDN | 1409 | GTWDTSLSVGM |
| GLP1R221-025 | 1052 | SSNIGKYY | 1231 | DNY | 1410 | ATWDRGLSTGV |
| GLP1R221-007 | 1053 | SSNIGNND | 1232 | ENT | 1411 | GTWDANLRAGV |
| GLP1R221-093 | 1054 | SSNIENNH | 1233 | END | 1412 | ATWDTSLSEGV |
| GLP1R221-024 | 1055 | SSNIGKYY | 1234 | DTN | 1413 | ATWDRGLSTGV |
| GLP1R221-008 | 1056 | SSSIGNNY | 1235 | ANN | 1414 | GTWDISLSAAV |
| GLP1R221-050 | 1057 | SSNIGNNF | 1236 | DKN | 1415 | ATWDTRLSAVV |
| GLP1R221-062 | 1058 | SSNIGNNY | 1237 | ENN | 1416 | GTWDASLGAWV |
| GLP1R221-068 | 1059 | SSNIGSND | 1238 | NNN | 1417 | GTWDARLGGAV |
| GLP1R221-067 | 1060 | SSNIGNNY | 1239 | ANN | 1418 | GTWDARLGGAV |
| GLP1R221-061 | 1061 | SSNIGTNF | 1240 | DNN | 1419 | GTWDNRLSGWV |
| GLP1R221-064 | 1062 | SSNIGKDY | 1241 | ENT | 1420 | ATWDATLNTGV |
| GLP1R221-070 | 1063 | SSNIENNH | 1242 | QNN | 1421 | GTWDVSLNTQV |
| GLP1R221-006 | 1064 | SSNIGNNH | 1243 | GSN | 1422 | GTWDTSLNIGV |
| GLP1R221-045 | 1065 | SSNIGNND | 1244 | GNN | 1423 | GTWDTSLSGGI |
| GLP1R221-004 | 1066 | SSTIGNNY | 1245 | DND | 1424 | GTWESSLSAGV |
| GLP1R221-047 | 1067 | SSNIGNEY | 1246 | GDD | 1425 | GTWDTSLSVGM |
| GLP1R221-048 | 1068 | SSNIGNHD | 1247 | AND | 1426 | GTWDTSLSVGE |
| GLP1R-222-052 | 1069 | SSNIGKRS | 1248 | DNN | 1427 | VTWDRSLSAGV |
| GLP1R-222-016 | 1070 | SSNIENND | 1249 | DFN | 1428 | GTWDTSLSVGM |
| GLP1R-222-023 | 1071 | SSNIGNND | 1250 | ENT | 1429 | GTWDAGLSTGV |
| GLP1R-222-014 | 1072 | SSNIGNHD | 1251 | DNN | 1430 | GTWDTSLSAGV |
| GLP1R-222-090 | 1073 | SSNIADNY | 1252 | DNN | 1431 | ATWDNRLSAGV |
| GLP1R-222-073 | 1074 | GSNIGNND | 1253 | DNN | 1432 | GTWDRGPNTGV |
| GLP1R-222-012 | 1075 | SSNIGNND | 1254 | DDD | 1433 | GTWDTSLSVGE |
| GLP1R-222-082 | 1076 | SSNIGSKY | 1255 | DNN | 1434 | GTWDISPSAWV |
| GLP1R-222-081 | 1077 | SSNIGSDY | 1256 | DNN | 1435 | GTWDESLRSWV |
| GLP1R-222-056 | 1078 | SSNIGSNY | 1257 | DND | 1436 | GTWDTSLSVGE |
| GLP1R-222-058 | 1079 | SSNIGNNP | 1258 | DNN | 1437 | ATWDNKLTSGV |
| GLP1R-222-063 | 1080 | SSNIGNYY | 1259 | DNN | 1438 | ATWDTSLNVGV |
| GLP1R-222-042 | 1081 | SSNIGNND | 1260 | DDN | 1439 | GTWDTSLSAYI |
| GLP1R-222-092 | 1082 | SSNIGSDY | 1261 | ENN | 1440 | GTWDRGPNTGV |
| GLP1R-222-007 | 1083 | SSDIGNKY | 1262 | ENN | 1441 | GTWDTSLSAGA |
| GLP1R-222-008 | 1084 | SSNIGSNH | 1263 | DNN | 1442 | GTWDTSLSVGE |
| GLP1R-222-024 | 1085 | TSNIGSNF | 1264 | DEN | 1443 | ATWDATLNTGV |
| GLP1R-222-062 | 1086 | SSNIENND | 1265 | DNN | 1444 | GTWDRSLNVGV |
| GLP1R-222-077 | 1087 | SSSIGNNY | 1266 | ENN | 1445 | GTWDNNLGAGV |
| GLP1R-222-064 | 1088 | SSNIGSKY | 1267 | DDN | 1446 | GTWDTSLSTGV |
| GLP1R-222-074 | 1089 | SSNIGNND | 1268 | DNN | 1447 | GTWDRGPNTGV |
| GLP1R-222-029 | 1090 | SSNIGNNY | 1269 | END | 1448 | GTWDTSLATGL |
| GLP1R-222-046 | 1091 | TSNIGNNY | 1270 | ENT | 1449 | GTWDTTLSAGV |
| GLP1R-222-005 | 1092 | SSNIGNDY | 1271 | DNN | 1450 | GTWDASLSAGL |
| GLP1R-222-004 | 1093 | SSNIGNDY | 1272 | ENN | 1451 | GTWDASLSAGL |
| GLP1R-222-022 | 1094 | SSNIGNND | 1273 | DND | 1452 | GTWDRTLSIGV |
| GLP1R-222-087 | 1095 | SSNIENND | 1274 | DNN | 1453 | GTWDRRLSDVV |
| GLP1R-222-048 | 1096 | RSNIGNNF | 1275 | DNN | 1454 | GTWDRSLSSAV |
| GLP1R-222-072 | 1097 | SSSIGNNY | 1276 | DTN | 1455 | GTWDRSLNVGV |
| GLP1R-222-089 | 1098 | SSNIGNND | 1277 | DTN | 1456 | GTWDISLSARV |
| GLP1R-222-083 | 1099 | SSNIGSKY | 1278 | DND | 1457 | ATWDTSLSAGV |
| GLP1R-222-001 | 1100 | SSNIGSKY | 1279 | DNN | 1458 | GTWDTSLATGL |
| GLP1R-222-075 | 1101 | SSNIGSKD | 1280 | DTY | 1459 | GTWDTSVSAGV |
| GLP1R-222-071 | 1102 | TSNIGNNY | 1281 | DDN | 1460 | GTWDRSLNVGV |
| GLP1R-222-069 | 1103 | SSNIGSHY | 1282 | DNN | 1461 | GTWHSSLSAGV |
| GLP1R-222-002 | 1104 | SSDIGNKY | 1283 | DND | 1462 | GTWDTTLSAGV |
| GLP1R-222-006 | 1105 | SSNIGNND | 1284 | DNN | 1463 | GAWDTSLSAVV |
| GLP1R-222-055 | 1106 | TSNIGNNY | 1285 | DNN | 1464 | GTWDTSLSVGE |
| GLP1R-222-027 | 1107 | TSNIGNNH | 1286 | EDN | 1465 | GTWDTSLATGL |
| GLP1R-222-066 | 1108 | SSTIGNNY | 1287 | DNN | 1466 | ATWDRGLSTGV |
| GLP1R-222-015 | 1109 | RSNIGNYY | 1288 | DND | 1467 | GTWDRSLSVGL |
| GLP1R-222-076 | 1110 | SSNIGSKY | 1289 | DTY | 1468 | GTWDAGLSTGV |
| GLP1R-222-011 | 1111 | SSNIGSNY | 1290 | ENN | 1469 | GTWDTSLSVGE |
| GLP1R-222-065 | 1112 | SSTIGNNY | 1291 | DNN | 1470 | ATWDRTLSIGV |
| GLP1R-222-041 | 1113 | SSNIGSKD | 1292 | DDN | 1471 | GIWDRSLSAWV |
| GLP1R-222-028 | 1114 | TSNIGNNH | 1293 | DNN | 1472 | GTWDTSLATGL |
| GLP1R-222-086 | 1115 | SSNIGNHF | 1294 | DTN | 1473 | GTWDRGPNTGV |
| GLP1R-222-033 | 1116 | SSNIGKYY | 1295 | DNN | 1474 | GTWDVSLSVGM |
| GLP1R-222-035 | 1117 | SSNIGNND | 1296 | ENN | 1475 | GTWDVSLSVGM |
| GLP1R-222-045 | 1118 | SSNIGNTY | 1297 | ENR | 1476 | ATWDTSLSEGV |
| GLP1R-222-085 | 1119 | SSNIGSDY | 1298 | ANN | 1477 | GTWDVTLHAGV |
| GLP1R-222-049 | 1120 | TSNIGKNF | 1299 | ENK | 1478 | ATWDRSLSAGV |
| GLP1R-222-078 | 1121 | SSNIGKYY | 1300 | DTN | 1479 | GTWDNNLGAGV |
| GLP1R-222-021 | 1122 | SSNIGDND | 1301 | ENR | 1480 | GTWDASLSAGL |
| GLP1R-222-009 | 1123 | SSNIGKNF | 1302 | DTN | 1481 | GTWDTSLSVGE |
| GLP1R-222-036 | 1124 | SSNIGSKY | 1303 | DNN | 1482 | ATWDDTLTAGV |
| GLP1R-222-084 | 1125 | SSNIGSKD | 1304 | DNN | 1483 | GIWDTSLSAWV |
| GLP1R-222-010 | 1126 | SSNIGNKY | 1305 | DNN | 1484 | GTWDNRLSAGV |
| GLP1R-222-088 | 1127 | SSNIGNNF | 1306 | DND | 1485 | GTWDTSLRVVV |
| GLP1R-222-079 | 1128 | SSNIGSND | 1307 | NNN | 1486 | GTWESGLSAGV |
| GLP1R-222-040 | 1129 | SSNIGNQY | 1308 | DTY | 1487 | ATWDHSLRVGV |
| GLP1R-222-070 | 1130 | SSNIGNND | 1309 | ANN | 1488 | GTWHSSLSAGV |
| GLP1R-222-032 | 1131 | SSNIGNNP | 1310 | END | 1489 | GTWDTRLSVGV |
| GLP1R-222-030 | 1132 | SSNIGNNL | 1311 | DND | 1490 | GTWDTSLTAGV |
| GLP1R-222-038 | 1133 | SSNIGNKY | 1312 | DTN | 1491 | ATWDATLNTGV |
| GLP1R-222-031 | 1134 | SSNIGNNY | 1313 | DDN | 1492 | GTWDTSLSVGM |
| GLP1R-222-026 | 1135 | SSNIGSKY | 1314 | DNN | 1493 | GTWDRGPNTGV |
| GLP1R-222-054 | 1136 | SSNIGSKY | 1315 | DDY | 1494 | GTWDNRLSGWV |
| GLP1R-222-093 | 1137 | RSNIGNNF | 1316 | DNY | 1495 | ATWDRGLSTGV |
| GLP1R-222-051 | 1138 | RSNIGNNF | 1317 | DNN | 1496 | ATWDRSLSAGV |
| GLP1R-222-067 | 1139 | RSNIGNNF | 1318 | DNN | 1497 | GTWDRRLSAVV |
| GLP1R-222-059 | 1140 | SSNIGNEY | 1319 | ENN | 1498 | GTWDNYLGAVV |
| GLP1R-222-025 | 1141 | SSNIGNEY | 1320 | DND | 1499 | ATWDATLNTGV |
| GLP1R-222-068 | 1142 | RSNIGNNF | 1321 | ENN | 1500 | GSWDRSLSAVV |
| GLP1R-222-053 | 1143 | SSNIGNND | 1322 | ASN | 1501 | ATWDNILSAWV |
| GLP1R-222-018 | 1144 | SSNIGKNF | 1323 | ETN | 1502 | ATWDRGLSTGV |
| GLP1R-222-047 | 1145 | SSNIGTNF | 1324 | ADN | 1503 | GTWDRTLSIGV |
| GLP1R-222-060 | 1146 | SSNIGNNP | 1325 | GNN | 1504 | GTWDASLGAVV |
| GLP1R-222-020 | 1147 | SSNIGNND | 1326 | DND | 1505 | GTWDAGLSTGV |
| GLP1R-222-044 | 1148 | SSNIGNNH | 1327 | DFN | 1506 | ATWDRSLRAGV |
| GLP1R-222-080 | 1149 | SSNIGNHD | 1328 | ENK | 1507 | GTWESGLSAGV |
| GLP1R-222-057 | 1150 | SSNIGDHY | 1329 | ENN | 1508 | ATWDNKLTSGV |
| GLP1R-222-043 | 1151 | SSNIGNNY | 1330 | DNN | 1509 | ATWDRSLRAGV |
| GLP1R-222-003 | 1152 | SSNIGNHD | 1331 | ENN | 1510 | GTWDTSLSAGV |
| GLP1R-222-037 | 1153 | SSNIGNNP | 1332 | NNN | 1511 | ATWDTTLNTGV |
| GLP1R-222-091 | 1154 | SSNIGSNY | 1333 | GND | 1512 | ASWDNRLTAVV |
| GLP1R-222-019 | 1155 | SSNIGNNY | 1334 | DNN | 1513 | ATWDRGLSTGV |
| GLP1R-222-094 | 1156 | SSNIGNTY | 1335 | ENK | 1514 | ATWDTSLSEGV |

[0248] While preferred embodiments of the present disclosure have been shown and described herein, it will be obvious to those skilled in the art that such embodiments are provided by way of example only. Numerous variations, changes, and substitutions will now occur to those skilled in the art without departing from the disclosure. It should be understood that various alternatives to the embodiments of the disclosure described herein may be employed in practicing the disclosure. It is intended that the following claims define the scope of the disclosure and that methods and structures within the scope of these claims and their equivalents be covered thereby.

1. A method of treating a metabolic disease or disorder comprising administering an antibody or antibody fragment that binds GLP1R comprising a heavy chain and a light chain, wherein the heavy chain comprises a heavy chain variable region (VH) and the light chain comprises a light chain variable region (VL), wherein:
(a) the VH comprises a CDR-H1 comprising the amino acid sequence of SEQ ID NO: 441, a CDR-H2 comprising the amino acid sequence of SEQ ID NO: 620, and a CDR-H3 comprising the amino acid sequence of SEQ ID NO: 799, and wherein the VL comprises a CDR-L1 comprising the amino acid sequence of SEQ ID NO: 978, a CDR-L2 comprising the amino acid sequence of SEQ ID NO: 1157, and a CDR-L3 comprising the amino acid sequence of SEQ ID NO: 1336;
(b) the VH comprises a CDR-H1 comprising the amino acid sequence of SEQ ID NO: 534, a CDR-H2 comprising the amino acid sequence of SEQ ID NO: 713, and a CDR-H3 comprising the amino acid sequence of SEQ ID NO: 892, and wherein the VL comprises a CDR-L1 comprising the amino acid sequence of SEQ ID NO: 1071, a CDR-L2 comprising the amino acid sequence of SEQ ID NO: 1250, and a CDR-L3 comprising the amino acid sequence of SEQ ID NO: 1429;
(c) the VH comprises a CDR-H1 comprising the amino acid sequence of SEQ ID NO: 561, a CDR-H2 comprising the amino acid sequence of SEQ ID NO: 740, and a CDR-H3 comprising the amino acid sequence of SEQ ID NO: 919, and wherein the VL comprises a CDR-L1 comprising the amino acid sequence of SEQ ID NO: 1098, a CDR-L2 comprising the amino acid sequence of SEQ ID NO: 1277, and a CDR-L3 comprising the amino acid sequence of SEQ ID NO. 1456; or
(d) the VH comprises a CDR-H1 comprising the amino acid sequence of SEQ ID NO: 592, a CDR-H2 comprising the amino acid sequence of SEQ ID NO: 771, and a CDR-H3 comprising the amino acid sequence of SEQ ID NO: 950, and wherein the VL comprises a CDR-L1 comprising the amino acid sequence of SEQ ID NO: 129, a CDR-L2 comprising the amino acid sequence of SEQ ID NO: 1308, and a CDR-L3 comprising the amino acid sequence of SEQ ID NO: 1487.

2. The method of claim 1, wherein the VH comprises a CDR-H1 comprising the amino acid sequence of SEQ ID NO: 441, a CDR-H2 comprising the amino acid sequence of SEQ ID NO: 620, and a CDR-H3 comprising the amino acid sequence of SEQ ID NO: 799, and wherein the VL comprises a CDR-L1 comprising the amino acid sequence of SEQ ID NO: 978, a CDR-L2 comprising the amino acid sequence of SEQ ID NO: 1157, and a CDR-L3 comprising the amino acid sequence of SEQ ID NO: 1336.

3. The method of claim 1, wherein the heavy chain comprises an amino acid sequence at least 90% identical to the amino acid sequence of SEQ ID NO: 54, and wherein the light chain comprises an amino acid sequence at least 90/6 identical to the amino acid sequence of SEQ ID NO: 89.

4. The method of claim 1, wherein the heavy chain comprises an amino acid sequence at least 95% identical to the amino acid sequence of SEQ ID NO: 54, and wherein the light chain comprises an amino acid sequence at least 95% identical to the amino acid sequence of SEQ ID NO: 89.

5. The method of claim 1, wherein the heavy chain comprises the amino acid sequence of SEQ ID NO: 54, and wherein the light chain comprises the amino acid sequence of SEQ ID NO: 89.

6. The method of claim 1, wherein the VH comprises a CDR-H1 comprising the amino acid sequence of SEQ ID NO: 534, a CDR-H2 comprising the amino acid sequence of SEQ ID NO: 713, and a CDR-H3 comprising the amino acid sequence of SEQ ID NO: 892, and wherein the VL comprises a CDR-L1 comprising the amino acid sequence of SEQ ID NO: 1071, a CDR-L2 comprising the amino acid sequence of SEQ ID NO: 1250, and a CDR-L3 comprising the amino acid sequence of SEQ ID NO: 1429.

7. The method of claim 1, wherein the VH comprises an amino acid sequence at least 90% identical to the amino acid sequence of SEQ ID NO: 70, and wherein the VL comprises an amino acid sequence at least 90% identical to the amino acid sequence of SEQ ID NO: 104.

8. The method of claim 1, wherein the VH comprises the amino acid sequence of SEQ ID NO: 70, and wherein the VL comprises the amino acid sequence of SEQ ID NO: 104.

9. The method of claim 1, wherein the antibody is a monoclonal antibody, a bi-specific antibody, a multispecific antibody, a grafted antibody, humanized antibody, a synthetic antibody, a chimeric antibody, a single-chain Fvs (scFv), a single chain antibody, a Fab fragment, a F(ab′)2 fragment, a Fv fragment, a single-domain antibody, a diabody, disulfide-linked Fvs (sdFv), an intrabody, or an antigen-binding fragment thereof.

10. The method of claim 1, wherein the antibody or antibody fragment thereof is chimeric or humanized.

11. A method of treating hyperinsulinemia or hypoglycemia comprising administering an antibody or antibody fragment that binds GLP1R comprising a heavy chain and a light chain, wherein the heavy chain comprises a heavy chain variable region (VH) and the light chain comprises a light chain variable region (VL), wherein:
(a) the VH comprises a CDR-H1 comprising the amino acid sequence of SEQ ID NO: 441, a CDR-H2 comprising the amino acid sequence of SEQ ID NO: 620, and a CDR-H3 comprising the amino acid sequence of SEQ ID NO: 799, and wherein the VL comprises a CDR-L1 comprising the amino acid sequence of SEQ ID NO: 978, a CDR-L2 comprising the amino acid sequence of SEQ ID NO: 1157, and a CDR-L3 comprising the amino acid sequence of SEQ ID NO: 1336; or
(b) the VH comprises a CDR-H1 comprising the amino acid sequence of SEQ ID NO: 534, a CDR-H2 comprising the amino acid sequence of SEQ ID NO: 713, and a CDR-H3 comprising the amino acid sequence of SEQ ID NO: 892, and wherein the VL comprises a CDR-L1 comprising the amino acid sequence of SEQ ID NO: 1071, a CDR-L2 comprising the amino acid sequence of SEQ ID NO: 1250, and a CDR-L3 comprising the amino acid sequence of SEQ ID NO: 1429.

12. The method of claim 11, wherein the VH comprises a CDR-H1 comprising the amino acid sequence of SEQ ID NO: 441, a CDR-H2 comprising the amino acid sequence of SEQ ID NO: 620, and a CDR-H3 comprising the amino acid sequence of SEQ ID NO: 799, and wherein the VL comprises a CDR-L1 comprising the amino acid sequence of SEQ ID NO: 978, a CDR-L2 comprising the amino acid sequence of SEQ ID NO: 1157, and a CDR-L3 comprising the amino acid sequence of SEQ ID NO: 1336.

13. The method of claim 11, wherein the heavy chain comprises an amino acid sequence at least 90% identical to the amino acid sequence of SEQ ID NO: 54, and wherein the light chain comprises an amino acid sequence at least 90% identical to the amino acid sequence of SEQ ID NO: 89.

14. The method of claim 11, wherein the heavy chain comprises an amino acid sequence at least 95% identical to the amino acid sequence of SEQ ID NO: 54, and wherein the light chain comprises an amino acid sequence at least 95% identical to the amino acid sequence of SEQ ID NO: 89.

15. The method of claim 11, wherein the heavy chain comprises the amino acid sequence of SEQ ID NO: 54, and wherein the light chain comprises the amino acid sequence of SEQ ID NO: 89.

16. The method of claim 11, wherein the VH comprises a CDR-H1 comprising the amino acid sequence of SEQ ID NO: 534, a CDR-H2 comprising the amino acid sequence of SEQ ID NO: 713, and a CDR-H3 comprising the amino acid sequence of SEQ ID NO: 892, and wherein the VL comprises a CDR-L1 comprising the amino acid sequence of SEQ ID NO: 1071, a CDR-L2 comprising the amino acid sequence of SEQ ID NO: 1250, and a CDR-L3 comprising the amino acid sequence of SEQ ID NO: 1429.

17. The method of claim 11, wherein the VH comprises an amino acid sequence at least 90% identical to the amino acid sequence of SEQ ID NO: 70, and wherein the VL comprises an amino acid sequence at least 90% identical to the amino acid sequence of SEQ ID NO: 104.

18. The method of claim 11, wherein the VH comprises the amino acid sequence of SEQ ID NO: 70, and wherein the VL comprises the amino acid sequence of SEQ ID NO: 104.

19. The method of claim 11, wherein the antibody is a monoclonal antibody, a bi-specific antibody, a multispecific antibody, a grafted antibody, humanized antibody, a synthetic antibody, a chimeric antibody, a single-chain Fvs (scFv), a single chain antibody, a Fab fragment, a F(ab′)2 fragment, a Fv fragment, a single-domain antibody, a diabody, disulfide-linked Fvs (sdFv), an intrabody, or an antigen-binding fragment thereof.

20. The method of claim 11, wherein the antibody or antibody fragment thereof is chimeric or humanized.

21. The method of claim 11, wherein the hyperinsulinemia is congenital hyperinsulinemia.

22. The method of claim 11, wherein the hypoglycemia is post-bariatric hypoglycemia or severe hypoglycemia.

The application's sequence listing, which the Patent Office published only in electronic form, follows.

SEQUENCE LISTING (1530 sequences)

SEQ ID NO: 1 - protein, 43 aa, synthetic construct
  REGION 1..43: note = Description of Artificial Sequence: Synthetic polypeptide
CAKHMSMQEGAVTGEGQAAKEFIAWLVKGRVRADLVGDAFDVW

SEQ ID NO: 2 - protein, 52 aa, synthetic construct
  REGION 1..52: note = Description of Artificial Sequence: Synthetic polypeptide
CARDGRGSLPRPKGGPQTVGEGQAAKEFIAWLVKGGLTYDSSEDSGGAFDIW

SEQ ID NO: 3 - protein, 44 aa, synthetic construct
  REGION 1..44: note = Description of Artificial Sequence: Synthetic polypeptide
CAKHMSMQDYLVIGEGQAAKEFIAWLVKGGPARADLVGDAFDVW

SEQ ID NO: 4 - protein, 43 aa, synthetic construct
  REGION 1..43: note = Description of Artificial Sequence: Synthetic polypeptide
CAKHMSMQEGAVTGEGQDAKEFIAWLVKGRVRADLVGDAFDVW

SEQ ID NO: 5 - protein, 43 aa, synthetic construct
  REGION 1..43: note = Description of Artificial Sequence: Synthetic polypeptide
WAKHMSMQEGAVTGEGQAAKEFIAWLVKGRVRADLVGDAFDVW

SEQ ID NO: 6 - protein, 49 aa, synthetic construct
  REGION 1..49: note = Description of Artificial Sequence: Synthetic polypeptide
CARDGRGSLPRPKGGPQTVGEGQAAKEFIAWLVKGRVRADLVGDAFDVW

SEQ ID NO: 7 - protein, 51 aa, synthetic construct
  REGION 1..51: note = Description of Artificial Sequence: Synthetic polypeptide
CARANQHFYEQEGTFTSDVSSYLEGQAAKEFIAWLVKGGIRGYHYYGMDVW

SEQ ID NO: 8 - protein, 44 aa, synthetic construct
  REGION 1..44: note = Description of Artificial Sequence: Synthetic polypeptide
CARANQHFTELHGEGQAAKEFIAWLVKGRGQIDIGYHYYGMDVW

SEQ ID NO: 9 - protein, 45 aa, synthetic construct
  REGION 1..45: note = Description of Artificial Sequence: Synthetic polypeptide
CARANQHFLGAGVSSYLEGQAAKEFIAWLVKGDTTGYHYYGMDVW

SEQ ID NO: 10 - protein, 50 aa, synthetic construct
  REGION 1..50: note = Description of Artificial Sequence: Synthetic polypeptide
CARANQHFLDKGTFTSDVSSYLEGQAAKEFIAWLVKGIYPGYHYYGMDVW

SEQ ID NO: 11 - protein, 46 aa, synthetic construct
  REGION 1..46: note = Description of Artificial Sequence: Synthetic polypeptide
CARANQHFGTLSAGEGQAAKEFIAWLVKGGSQYDSSEDSGGAFDIW

SEQ ID NO: 12 - protein, 43 aa, synthetic construct
  REGION 1..43: note = Description of Artificial Sequence: Synthetic polypeptide
CARANQHFGLHAQGEGQAAKEFIAWLVKGSGTYGYHYYGMDVW

SEQ ID NO: 13 - protein, 42 aa, synthetic construct
  REGION 1..42: note = Description of Artificial Sequence: Synthetic polypeptide
CARANQHFGGKGEGQAAKEFIAWLVKGGGSGAGYHYYGMDVW

SEQ ID NO: 14 - protein, 43 aa, synthetic construct
  REGION 1..43: note = Description of Artificial Sequence: Synthetic polypeptide
CAKQMSMQEGAVTGEGQAAKEFIAWLVKGRVRADLVGDAFDVW

SEQ ID NO: 15 - protein, 44 aa, synthetic construct
  REGION 1..44: note = Description of Artificial Sequence: Synthetic polypeptide
CAKHMSMQEGAVTGEGQAAKEFIAWLVKGGPARADLVGDAFDVW

SEQ ID NO: 16 - protein, 46 aa, synthetic construct
  REGION 1..46: note = Description of Artificial Sequence: Synthetic polypeptide
CAKHMSMQEGAVTGEGQAAKEFIAWLVKGGLTYDSSEDSGGAFDIW

SEQ ID NO: 17 - protein, 43 aa, synthetic construct
  REGION 1..43: note = Description of Artificial Sequence: Synthetic polypeptide
CAKHMSMQDYLVIGEGQAAKEFIAWLVKGRVRADLVGDAFDVW

SEQ ID NO: 18 - protein, 29 aa, synthetic construct
  REGION 1..29: note = Description of Artificial Sequence: Synthetic peptide
CARANQHFVDLYGWHGVPKGYHYYGMDVW

SEQ ID NO: 19 - protein, 40 aa, synthetic construct
  REGION 1..40: note = Description of Artificial Sequence: Synthetic polypeptide
CARDMYYDFETVVEGIQWYEALKAGKLGEVVPADDAFDIW

SEQ ID NO: 20 - protein, 43 aa, synthetic construct; identical to SEQ ID NO: 1
  REGION 1..43: note = Description of Artificial Sequence: Synthetic polypeptide

SEQ ID NO: 21 - protein, 52 aa, synthetic construct; identical to SEQ ID NO: 2
  REGION 1..52: note = Description of Artificial Sequence: Synthetic polypeptide

SEQ ID NO: 22 - protein, 42 aa, synthetic construct
  REGION 1..42: note = Description of Artificial Sequence: Synthetic polypeptide
CARANQHFFVPGSLKVWLKGVAPESSSEYDSSEDSGGAFDIW

SEQ ID NO: 23 - protein, 42 aa, synthetic construct
  REGION 1..42: note = Description of Artificial Sequence: Synthetic polypeptide
CARANQHFLSHAGAARDFINWLIQTKITGLGSGYHYYGMDVW

SEQ ID NO: 24 - protein, 41 aa, synthetic construct
  REGION 1..41: note = Description of Artificial Sequence: Synthetic polypeptide
CAKHMSMQEGVLQGQIPSTIDWEGLLHLIRADLVGDAFDVW

SEQ ID NO: 25 - protein, 48 aa, synthetic construct
  REGION 1..48: note = Description of Artificial Sequence: Synthetic polypeptide
CARDMYYDFLKIGDNLAARDFINWLIQTKITDGTDTEVVPADDAFDIW

SEQ ID NO: 26 - protein, 46 aa, synthetic construct
  REGION 1..46: note = Description of Artificial Sequence: Synthetic polypeptide
CARDGRGSLPRPKGGPKFVPGKHETYGHKTGYRLRPGYHYYGMDVW

SEQ ID NO: 27 - protein, 42 aa, synthetic construct
  REGION 1..42: note = Description of Artificial Sequence: Synthetic polypeptide
CARANQHFFSGAEGEGQAAKEFIAWLVKGIIPGYHYYGMDVW

SEQ ID NO: 28 - protein, 43 aa, synthetic construct; identical to SEQ ID NO: 12
  REGION 1..43: note = Description of Artificial Sequence: Synthetic polypeptide

SEQ ID NO: 29 - protein, 44 aa, synthetic construct; identical to SEQ ID NO: 3
  REGION 1..44: note = Description of Artificial Sequence: Synthetic polypeptide

SEQ ID NO: 30 - protein, 51 aa, synthetic construct
  REGION 1..51: note = Description of Artificial Sequence: Synthetic polypeptide
CARDGRGSLPRPKGGPPSSGRDFINWLIQTKITDGFRYDSSEDSGGAFDIW

SEQ ID NO: 31 - protein, 65 aa, synthetic construct
  REGION 1..65: note = Description of Artificial Sequence: Synthetic polypeptide
CARDLRELECEEWTRHGGKKHHGKRQSNRAHQGKHETYGHKTGSLVPSRGPCVDPRGVAGSFDVW

SEQ ID NO: 32 - protein, 54 aa, synthetic construct
  REGION 1..54: note = Description of Artificial Sequence: Synthetic polypeptide
CARDMYYDFHPEGTFTSDVSSYLEGQAAKEFIAWLVKGSLIYEVVPADDAFDIW

SEQ ID NO: 33 - protein, 62 aa, synthetic construct
  REGION 1..62: note = Description of Artificial Sequence: Synthetic polypeptide
CARANQHFGPVAGGATPSEEPGSQLTRAELGWDAPPGQESLADELLQLGTEHGYHYYGMDVW

SEQ ID NO: 34 - protein, 43 aa, synthetic construct; identical to SEQ ID NO: 1
  REGION 1..43: note = Description of Artificial Sequence: Synthetic polypeptide

SEQ ID NO: 35 - protein, 42 aa, synthetic construct; identical to SEQ ID NO: 23
  REGION 1..42: note = Description of Artificial Sequence: Synthetic polypeptide

SEQ ID NO: 36 - protein, 41 aa, synthetic construct
  REGION 1..41: note = Description of Artificial Sequence: Synthetic polypeptide
CARDGRGSLPRPKGGPHSGRLGSGYKSYDSSEDSGGAFDIW

SEQ ID NO: 37 - protein, 37 aa, synthetic construct
  REGION 1..37: note = Description of Artificial Sequence: Synthetic polypeptide
CARANQHFSQAGRAARVPGPSSSLGPRGYHYYGMDVW

SEQ ID NO: 38 - protein, 48 aa, synthetic construct
  REGION 1..48: note = Description of Artificial Sequence: Synthetic polypeptide
CAKHMSMQSQGLDNLAARDFINWLIQTKITDGFELSRADLVGDAFDVW

SEQ ID NO: 39 - protein, 53 aa, synthetic construct
  REGION 1..53: note = Description of Artificial Sequence: Synthetic polypeptide
CARDMYYDFFGLGTFTSDVSSYLEGQAAKEFIAWLVKGVSPEVVPADDAFDIW

SEQ ID NO: 40 - protein, 56 aa, synthetic construct
  REGION 1..56: note = Description of Artificial Sequence: Synthetic polypeptide
CAKHMSMQGSVAGGTFTSDVSSYLEGQAAKEFIAWLVKGGPSFIRADLVGDAFDVW

SEQ ID NO: 41 - protein, 53 aa, synthetic construct
  REGION 1..53: note = Description of Artificial Sequence: Synthetic polypeptide
CAKHMSMQADTGTFTSDVSSYLEGQAAKEFIAWLVKGEFSSRADLVGDAFDVW

SEQ ID NO: 42 - protein, 45 aa, synthetic construct
  REGION 1..45: note = Description of Artificial Sequence: Synthetic polypeptide
CARANQHFFGKGDNLAARDFINWLIQTKITDGSNPGYHYYGMDVW

SEQ ID NO: 43 - protein, 43 aa, synthetic construct
  REGION 1..43: note = Description of Artificial Sequence: Synthetic polypeptide
CARANQHFAATGAGEGQAAKEFIAWLVKGRVEIGYHYYGMDVW

SEQ ID NO: 44 - protein, 488 aa, synthetic construct
  REGION 1..488: note = Description of Artificial Sequence: Synthetic polypeptide
MEWSWVFLFFLSVTTGVHSQVQLVQSGAEVKKPGSSVKVSCKASGGSFSSHAISWVRQAPGQGLEWMGGIIPIFGAPNYAQKFQGRVTITADESTSTAYMELSSLRSEDTAVYYCARANQHFSQAGRAARVPGPSSSLGPRGYHYYGMDVWGQGTLVTVSSASASTKGPSVFPLAPCSRSTSESTAALGCLVKDYFPEPVTVSWNSGALTSGVHTFPAVLQSSGLYSLSSVVTVPSSNFGTQTYTCNVDHKPSNTKVDKTVERKCCVECPPCPAPPVAGPSVFLFPPKPKDTLMISRTPEVTCVVVDVSHEDPEVQFNWYVDGVEVHNAKTKPREEQFNSTFRVVSVLTVVHQDWLNGKEYKCKVSNKGLPAPIEKTISKTKGQPREPQVYTLPPSREEMTKNQVSLTCLVKGFYPSDIAVEWESNGQPENNYKTTPPMLDSDGSFFLYSKLTVDKSRWQQGNVFSCSVMHEALHNHYTQKSLSLSPG

SEQ ID NO: 45 - protein, 499 aa, synthetic construct
  REGION 1..499: note = Description of Artificial Sequence: Synthetic polypeptide
MEWSWVFLFFLSVTTGVHSQVQLVESGGGVVQPGRSLRLSCAASGFDFSNYGMHWVRQAPGKGLEWVADISYEGSNKYYADSVKGRFTISRDNSKNTLYLQMNSLRAEDTAVYYCAKHMSMQSQGLDNLAARDFINWLIQTKITDGFELSRADLVGDAFDVWGQGTLVTVSSASASTKGPSVFPLAPCSRSTSESTAALGCLVKDYFPEPVTVSWNSGALTSGVHTFPAVLQSSGLYSLSSVVTVPSSNFGTQTYTCNVDHKPSNTKVDKTVERKCCVECPPCPAPPVAGPSVFLFPPKPKDTLMISRTPEVTCVVVDVSHEDPEVQFNWYVDGVEVHNAKTKPREEQFNSTFRVVSVLTVVHQDWLNGKEYKCKVSNKGLPAPIEKTISKTKGQPREPQVYTLPPSREEMTKNQVSLTCLVKGFYPSDIAVEWESNGQPENNYKTTPPMLDSDGSFFLYSKLTVDKSRWQQGNVFSCSVMHEALHNHYTQKSLSLSPG

SEQ ID NO: 46 - protein, 504 aa, synthetic construct
  REGION 1..504: note = Description of Artificial Sequence: Synthetic polypeptide
MEWSWVFLFFLSVTTGVHSQVQLVQSGAEVKKPGSSVKVSCKASGGTFNNYGISWVRQAPGQGLEWMGGIIPVFGTANYAQKFQGRVTITADESTSTAYMELSSLRSEDTAVYYCARDMYYDFFGLGTFTSDVSSYLEGQAAKEFIAWLVKGVSPEVVPADDAFDIWGQGTLVTVSSASASTKGPSVFPLAPCSRSTSESTAALGCLVKDYFPEPVTVSWNSGALTSGVHTFPAVLQSSGLYSLSSVVTVPSSNFGTQTYTCNVDHKPSNTKVDKTVERKCCVECPPCPAPPVAGPSVFLFPPKPKDTLMISRTPEVTCVVVDVSHEDPEVQFNWYVDGVEVHNAKTKPREEQFNSTFRVVSVLTVVHQDWLNGKEYKCKVSNKGLPAPIEKTISKTKGQPREPQVYTLPPSREEMTKNQVSLTCLVKGFYPSDIAVEWESNGQPENNYKTTPPMLDSDGSFFLYSKLTVDKSRWQQGNVFSCSVMHEALHNHYTQKSLSLSPG

SEQ ID NO: 47 - protein, 507 aa, synthetic construct
  REGION 1..507: note = Description of Artificial Sequence: Synthetic polypeptide
MEWSWVFLFFLSVTTGVHSQVQLVQSGAEVKKPGSSVKVSCKASGGTFSDYAISWVRQAPGQGLEWMGGIIPIFGTTNYAQKFQGRVTITADESTSTAYMELSSLRSEDTAVYYCAKHMSMQGSVAGGTFTSDVSSYLEGQAAKEFIAWLVKGGPSFIRADLVGDAFDVWGQGTLVTVSSASASTKGPSVFPLAPCSRSTSESTAALGCLVKDYFPEPVTVSWNSGALTSGVHTFPAVLQSSGLYSLSSVVTVPSSNFGTQTYTCNVDHKPSNTKVDKTVERKCCVECPPCPAPPVAGPSVFLFPPKPKDTLMISRTPEVTCVVVDVSHEDPEVQFNWYVDGVEVHNAKTKPREEQFNSTFRVVSVLTVVHQDWLNGKEYKCKVSNKGLPAPIEKTISKTKGQPREPQVYTLPPSREEMTKNQVSLTCLVKGFYPSDIAVEWESNGQPENNYKTTPPMLDSDGSFFLYSKLTVDKSRWQQGNVFSCSVMHEALHNHYTQKSLSLSPG

SEQ ID NO: 48 - protein, 504 aa, synthetic construct
  REGION 1..504: note = Description of Artificial Sequence: Synthetic polypeptide
MEWSWVFLFFLSVTTGVHSQVQLVQSGAEVKKPGSSVKVSCKASGGTFSSYEISWVRQAPGQGLEWMGGIIPILGIANYAQKFQGRVTITADESTSTAYMELSSLRSEDTAVYYCAKHMSMQADTGTFTSDVSSYLEGQAAKEFIAWLVKGEFSSRADLVGDAFDVWGQGTLVTVSSASASTKGPSVFPLAPCSRSTSESTAALGCLVKDYFPEPVTVSWNSGALTSGVHTFPAVLQSSGLYSLSSVVTVPSSNFGTQTYTCNVDHKPSNTKVDKTVERKCCVECPPCPAPPVAGPSVFLFPPKPKDTLMISRTPEVTCVVVDVSHEDPEVQFNWYVDGVEVHNAKTKPREEQFNSTFRVVSVLTVVHQDWLNGKEYKCKVSNKGLPAPIEKTISKTKGQPREPQVYTLPPSREEMTKNQVSLTCLVKGFYPSDIAVEWESNGQPENNYKTTPPMLDSDGSFFLYSKLTVDKSRWQQGNVFSCSVMHEALHNHYTQKSLSLSPG

SEQ ID NO: 49 - protein, 496 aa, synthetic construct
  REGION 1..496: note = Description of Artificial Sequence: Synthetic polypeptide
MEWSWVFLFFLSVTTGVHSQVQLVQSGAEVKKPGSSVKVSCKASGGTFSTYGINWVRQAPGQGLEWMGGIIPIFGTANYAQKFQGRVTITADESTSTAYMELSSLRSEDTAVYYCARANQHFFGKGDNLAARDFINWLIQTKITDGSNPGYHYYGMDVWGQGTLVTVSSASASTKGPSVFPLAPCSRSTSESTAALGCLVKDYFPEPVTVSWNSGALTSGVHTFPAVLQSSGLYSLSSVVTVPSSNFGTQTYTCNVDHKPSNTKVDKTVERKCCVECPPCPAPPVAGPSVFLFPPKPKDTLMISRTPEVTCVVVDVSHEDPEVQFNWYVDGVEVHNAKTKPREEQFNSTFRVVSVLTVVHQDWLNGKEYKCKVSNKGLPAPIEKTISKTKGQPREPQVYTLPPSREEMTKNQVSLTCLVKGFYPSDIAVEWESNGQPENNYKTTPPMLDSDGSFFLYSKLTVDKSRWQQGNVFSCSVMHEALHNHYTQKSLSLSPG

SEQ ID NO: 50 - protein, 494 aa, synthetic construct
  REGION 1..494: note = Description of Artificial Sequence: Synthetic polypeptide
MEWSWVFLFFLSVTTGVHSQVQLVQSGAEVKKPGSSVKVSCKASGGTFSSYAISWVRQAPGQGLEWMGGIIPIFGTANYAQKFQGRVTITADESTSTAYMELSSLRSEDTAVYYCARANQHFAATGAGEGQAAKEFIAWLVKGRVEIGYHYYGMDVWGQGTLVTVSSASASTKGPSVFPLAPCSRSTSESTAALGCLVKDYFPEPVTVSWNSGALTSGVHTFPAVLQSSGLYSLSSVVTVPSSNFGTQTYTCNVDHKPSNTKVDKTVERKCCVECPPCPAPPVAGPSVFLFPPKPKDTLMISRTPEVTCVVVDVSHEDPEVQFNWYVDGVEVHNAKTKPREEQFNSTFRVVSVLTVVHQDWLNGKEYKCKVSNKGLPAPIEKTISKTKGQPREPQVYTLPPSREEMTKNQVSLTCLVKGFYPSDIAVEWESNGQPENNYKTTPPMLDSDGSFFLYSKLTVDKSRWQQGNVFSCSVMHEALHNHYTQKSLSLSPG

SEQ ID NO: 51 - protein, 471 aa, synthetic construct
  REGION 1..471: note = Description of Artificial Sequence: Synthetic polypeptide
QVQLVESGGGVVQPGRSLRLSCAASGFTFSNYGMSWVRQAPGKGLEWVAVISYDAGNKYYADSVKGRFTISRDNSKNTLYLQMNSLRAEDTAVYYCARDMYYDFETVVEGIQWYEALKAGKLGEVVPADDAFDIWGQGTLVTVSSASTKGPSVFPLAPCSRSTSESTAALGCLVKDYFPEPVTVSWNSGALTSGVHTFPAVLQSSGLYSLSSVVTVPSSNFGTQTYTCNVDHKPSNTKVDKTVERKCCVECPPCPAPPVAGPSVFLFPPKPKDTLMISRTPEVTCVVVDVSHEDPEVQFNWYVDGVEVHNAKTKPREEQFNSTFRVVSVLTVVHQDWLNGKEYKCKVSNKGLPAPIEKTISKTKGQPREPQVYTLPPSREEMTKNQVSLTCLVKGFYPSDIAVEWESNGQPENNYKTTPPMLDSDGSFFLYSKLTVDKSRWQQGNVFSCSVMHEALHNHYTQKSLSLSPGK

SEQ ID NO: 52 - protein, 488 aa, synthetic construct
  REGION 1..488: note = Description of Artificial Sequence: Synthetic polypeptide
QVQLVQSGAEVKKPGSSVKVSCKASGGTFSDYAISWVRQAPGQGLEWMGGIIPIFGTTNYAQKFQGRVTITADESTSTAYMELSSLRSEDTAVYYCAKHMSMQGSVAGGTFTSDVSSYLEGQAAKEFIAWLVKGGPSFIRADLVGDAFDVWGQGTLVTVSSASASTKGPSVFPLAPCSRSTSESTAALGCLVKDYFPEPVTVSWNSGALTSGVHTFPAVLQSSGLYSLSSVVTVPSSNFGTQTYTCNVDHKPSNTKVDKTVERKCCVECPPCPAPPVAGPSVFLFPPKPKDTLMISRTPEVTCVVVDVSHEDPEVQFNWYVDGVEVHNAKTKPREEQFNSTFRVVSVLTVVHQDWLNGKEYKCKVSNKGLPAPIEKTISKTKGQPREPQVYTLPPSREEMTKNQVSLTCLVKGFYPSDIAVEWESNGQPENNYKTTPPMLDSDGSFFLYSKLTVDKSRWQQGNVFSCSVMHEALHNHYTQKSLSLSPG

SEQ ID NO: 53 - protein, 477 aa, synthetic construct
  REGION 1..477: note = Description of Artificial Sequence: Synthetic polypeptide
QVQLVQSGAEVKKPGSSVKVSCKASGGTFSTYGINWVRQAPGQGLEWMGGIIPIFGTANYAQKFQGRVTITADESTSTAYMELSSLRSEDTAVYYCARANQHFFGKGDNLAARDFINWLIQTKITDGSNPGYHYYGMDVWGQGTLVTVSSASASTKGPSVFPLAPCSRSTSESTAALGCLVKDYFPEPVTVSWNSGALTSGVHTFPAVLQSSGLYSLSSVVTVPSSNFGTQTYTCNVDHKPSNTKVDKTVERKCCVECPPCPAPPVAGPSVFLFPPKPKDTLMISRTPEVTCVVVDVSHEDPEVQFNWYVDGVEVHNAKTKPREEQFNSTFRVVSVLTVVHQDWLNGKEYKCKVSNKGLPAPIEKTISKTKGQPREPQVYTLPPSREEMTKNQVSLTCLVKGFYPSDIAVEWESNGQPENNYKTTPPMLDSDGSFFLYSKLTVDKSRWQQGNVFSCSVMHEALHNHYTQKSLSLSPG

SEQ ID NO: 54 - protein, 474 aa, synthetic construct
  REGION 1..474: note = Description of Artificial Sequence: Synthetic polypeptide
QVQLVESGGGVVQPGRSLRLSCAASGFTFSSYGMHWVRQAPGKGLEWVSFISYDESNKYYADSVKGRFTISRDNSKNTLYLQMNSLRAEDTAVYYCAKHMSMQEGAVTGEGQAAKEFIAWLVKGRVRADLVGDAFDVWGQGTLVTVSSASTKGPSVFPLAPCSRSTSESTAALGCLVKDYFPEPVTVSWNSGALTSGVHTFPAVLQSSGLYSLSSVVTVPSSNFGTQTYTCNVDHKPSNTKVDKTVERKCCVECPPCPAPPVAGPSVFLFPPKPKDTLMISRTPEVTCVVVDVSHEDPEVQFNWYVDGVEVHNAKTKPREEQFNSTFRVVSVLTVVHQDWLNGKEYKCKVSNKGLPAPIEKTISKTKGQPREPQVYTLPPSREEMTKNQVSLTCLVKGFYPSDIAVEWESNGQPENNYKTTPPMLDSDGSFFLYSKLTVDKSRWQQGNVFSCSVMHEALHNHYTQKSLSLSPGK

SEQ ID NO: 55 - protein, 375 aa, synthetic construct
  REGION 1..375: note = Description of Artificial Sequence: Synthetic polypeptide
MEWSWVFLFFLSVTTGVHSEVQLVESGGGLVQAGGSLRLSCAASGSIFRINAMGWFRQAPGKEREGVAAINNFGTTKYADSAKGRFTISADNAKNTVYLQMNSLKPEDTAVYYCAAVRWGPHNDDRYDWGQGTQVTVSSGGGGSEPKSSDKTHTCPPCPAPELLGGPSVFLFPPKPKDTLMISRTPEVTCVVVDVSHEDPEVKFNWYVDGVEVHNAKTKPREEQYNSTYRVVSVLTVLHQDWLNGKEYKCKVSNKALPAPIEKTISKAKGQPREPQVYTLPPSREEMTKNQVSLTCLVKGFYPSDIAVEWESNGQPENNYKTTPPVLDSDGSFFLYSKLTVDKSRWQQGNVFSCSVMHEALHNHYTQKSLSLSPG

SEQ ID NO: 56 - protein, 147 aa, synthetic construct
  REGION 1..147: note = Description of Artificial Sequence: Synthetic polypeptide
QVQLVESGGGVVQPGRSLRLSCAASGFTFSNYDMHWVRQAPGKGLEWVAVISYEGSDKYYADSVKGRFTISRDNSKNTLYLQMNSLRAEDTAVYYCARANQHFFVPGSLKVWLKGVAPESSSEYDSSEDSGGAFDIWGQGTLVTVSS

SEQ ID NO: 57 - protein, 146 aa, synthetic construct
  REGION 1..146: note = Description of Artificial Sequence: Synthetic polypeptide
QVQLVQSGAEVKKPGSSVKVSCKASGGTRSNYAINWVRQAPGQGLEWMGGIIPILGTADYAQKFQGRVTITADESTSTAYMELSSLRSEDTAVYYCAKHMSMQEGVLQGQIPSTIDWEGLLHLIRADLVGDAFDVWGQGTLVTVSS

SEQ ID NO: 58 - protein, 148 aa, synthetic construct
  REGION 1..148: note = Description of Artificial Sequence: Synthetic polypeptide
QVQLVESGGGVVQPGRSLRLSCAASGFTFNNYAMHWVRQAPGKGLEWVAVISYDRSNEYYADSVKGRFTISRDNSKNTLYLQMNSLRAEDTAVYYCAKHMSMQEGAVTGDGQAAKEFIAWLVKGRVRADLVGDAFDVWGQGTLVTVSS

SEQ ID NO: 59 - protein, 148 aa, synthetic construct
  REGION 1..148: note = Description of Artificial Sequence: Synthetic polypeptide
QVQLVESGGGVVQPGRSLRLSCAASGFTFSNYPMHWVRQAPGKGLEWVAVISYDETNKYYADSVKGRFTISRDNSKNTLYLQMNSLRAEDTAVYYCAKHMSMQEGAVTGEGQAAKEFIAWLVKGIVRADLVGDAFDVWGQGTLVTVSS

SEQ ID NO: 60 - protein, 148 aa, synthetic construct
  REGION 1..148: note = Description of Artificial Sequence: Synthetic polypeptide
QVQLVESGGGVVQPGRSLRLSCAASGFTFSDYGVHWVRQAPGKGLEWVAFISYDESNKYYADSVKGRFTISRDNSKNTLYLQMNSLRAEDTAVYYCAKHMSMQEGAVTGEYQAAKEFIAWLVKGRVRADLVGDAFDVWGQGTLVTVSS

SEQ ID NO: 61 - protein, 148 aa, synthetic construct
  REGION 1..148: note = Description of Artificial Sequence: Synthetic polypeptide
QVQLVESGGGVVQPGRSLRLSCAASGFSFSNYAMHWVRQAPGKGLEWVAVISHDRSNKYYADSVKGRFTISRDNSKNTLYLQMNSLRAEDTAVYYCAKHMSMQEGAVTGEGQAAKDFIAWLVKGRVRADLVGDAFDVWGQGTLVTVSS

SEQ ID NO: 62 - protein, 148 aa, synthetic construct
  REGION 1..148: note = Description of Artificial Sequence: Synthetic polypeptide
QVQLVESGGGVVQPGRSLRLSCAASGFTFNNYPMHWVRQAPGKGLEWVAVISYDETNKYYADSVKGRFTISRDNSKNTLYLQMNSLRAEDTAVYYCAKHMSMQEGAVTGEGQAAKEFIAWLVKGIVRADLVGDAFDVWGQGTLVTVSS

SEQ ID NO: 63 - protein, 148 aa, synthetic construct
  REGION 1..148: note = Description of Artificial Sequence: Synthetic polypeptide
QVQLVESGGGVVQPGRSLRLSCAASGFIFNNYGMHWVRQAPGKGLEWVAFISYGGSNKYYADSVKGRFTISRDNSKNTLYLQMNSLRAEDTAVYYCAKHMSMQEGAVTGEGQAVKEFIAWLVKGRVRADLVGDAFDVWGQGTLVTVSS

SEQ ID NO: 64 - protein, 148 aa, synthetic construct
  REGION 1..148: note = Description of Artificial Sequence: Synthetic polypeptide
QVQLVESGGGVVQPGRSLRLSCAASGFPFSNYGMHWVRQAPGKGLEWVAVISHDRSNKYYADSVKGRFTISRDNSKNTLYLQMNSLRAEDTAVYYCAKHMSMQEGAVTGEGQAVKEFIAWLVKGRVRADLVGDAFDVWGQGTLVTVSS

SEQ ID NO: 65 - protein, 148 aa, synthetic construct
  REGION 1..148: note = Description of Artificial Sequence: Synthetic polypeptide
QVQLVESGGGVVQPGRSLRLSCAASGFTFNNYAMHWVRQAPGKGLEWVAVISYDRSNEYYADSVKGRFTISRDNSKNTLYLQMNSLRAEDTAVYYCAKHMSMQEGAVTGEGQAIKEFIAWLVKGRVRADLVGDAFDVWGQGTLVTVSS

SEQ ID NO: 66 - protein, 148 aa, synthetic construct
  REGION 1..148: note = Description of Artificial Sequence: Synthetic polypeptide
QVQLVESGGGVVQPGRSLRLSCAASGFAFSNYGMHWVRQAPGKGLEWVAVISSDENNKYYADSVKGRFTISRDNSKNTLYLQMNSLRAEDTAVYYCAKHMSMQEGAVTGEMQAAKEFIAWLVKGRVRADLVGDAFDVWGQGTLVTVSS

SEQ ID NO: 67 - protein, 148 aa, synthetic construct
  REGION 1..148: note = Description of Artificial Sequence: Synthetic polypeptide
QVQLVESGGGVVQPGRSLRLSCAASGFIFSNYGMHWVRQAPGKGLEWVAVISDEGSNKYYADSVKGRFTISRDNSKNTLYLQMNSLRAEDTAVYYCAKHMSMQEGAVTGAGQAAKEFIAWLVKGRVRADLVGDAFDVWGQGTLVTVSS

SEQ ID NO: 68 - protein, 148 aa, synthetic construct
  REGION 1..148: note = Description of Artificial Sequence: Synthetic polypeptide
QVQLVESGGGVVQPGRSLRLSCAASGFTFNNYPMHWVRQAPGKGLEWVAVISYDESNKYYADSVKGRFTISRDNSKNTLYLQMNSLRAEDTAVYYCAKHMSMQEGAVTGGGQAAKEFIAWLVKGRVRADLVGDAFDVWGQGTLVTVSS

SEQ ID NO: 69 - protein, 148 aa, synthetic construct
  REGION 1..148: note = Description of Artificial Sequence: Synthetic polypeptide
QVQLVESGGGVVQPGRSLRLSCAASGFTFNNYAMHWVRQAPGKGLEWVAVISDEGSNKYYADSVKGRFTISRDNSKNTLYLQMNSLRAEDTAVYYCAKHMSMQEGAVTGEYQAAKEFIAWLVKGRVRADLVGDAFDVWGQGTLVTVSS

SEQ ID NO: 70 - protein, 148 aa, synthetic construct
  REGION 1..148: note = Description of Artificial Sequence: Synthetic polypeptide
QVQLVESGGGVVQPGRSLRLSCAASGFSFSDYGMHWVRQAPGKGLEWVAFISYDANNKYYADSVKGRFTISRDNSKNTLYLQMNSLRAEDTAVYYCAKHMSMQEGAVTGEWQAAKEFIAWLVKGRVRADLVGDAFDVWGQGTLVTVSS

SEQ ID NO: 71 - protein, 148 aa, synthetic construct
  REGION 1..148: note = Description of Artificial Sequence: Synthetic polypeptide
QVQLVESGGGVVQPGRSLRLSCAASGFAFSNYGMHWVRQAPGKGLEWVSFISYDESNKYYADSVKGRFTISRDNSKNTLYLQMNNLRAEDTAVYYCAKHMSMQEGAVTGEWQAAKEFIAWLVKGRVRADLVGDAFDVWGQGTLVTVSS

SEQ ID NO: 72 - protein, 148 aa, synthetic construct
  REGION 1..148: note = Description of Artificial Sequence: Synthetic polypeptide
QVQLVESGGGVVQPGRSLRLSCAASGFSFSDYGIHWVRQAPGKGLEWVALISYEGSNKYYADSVKGRFTISRDNSKNTLYLQMNSLRAEDTAVYYCAKHMSMQEGAVTGEKQAAKEFIAWLVKGRVRADLVGDAFDVWGQGTLVTVSS

SEQ ID NO: 73 - protein, 148 aa, synthetic construct
  REGION 1..148: note = Description of Artificial Sequence: Synthetic polypeptide
QVQLVESGGGVVQPGRSLRLSCAASGFTFRDYGMHWVRQAPGKGLEWVAFIRYDEINKYYADSVKGRFTISRDNSKNTLYLQMNSLRAEDTAVYYCAKHMSMQEGAVTGEGQAAKEFIAWLVGGRVRADLVGDAFDVWGQGTLVTVSS

SEQ ID NO: 74 - protein, 148 aa, synthetic construct
  REGION 1..148: note = Description of Artificial Sequence: Synthetic polypeptide
QVQLVESGGGVVQPGRSLRLSCAASGFTFNNYGMHWVRQAPGKGLEWVAVISDEGSNKYYADSVKGRFTISRDNSKNTLYLQMNSLRAEDTAVYYCAKHMSMQEGAVTGVGQAAKEFIAWLVKGRVRADLVGDAFDVWGQGTLVTVSS

SEQ ID NO: 75 - protein, 148 aa, synthetic construct
  REGION 1..148: note = Description of Artificial Sequence: Synthetic polypeptide
QVQLVESGGGVVQPGRSLRLSCAASGFTFSAYSMHWVRQAPGKGLEWVALISYDATNKYYADSVKGRFTISRDNSKNTLYLQMNSLRAEDTAVYYCAKHMSMQEGAVTGEFQAAKEFIAWLVKGRVRADLVGDAFDVWGQGTLVTVSS

SEQ ID NO: 76 - protein, 148 aa, synthetic construct
  REGION 1..148: note = Description of Artificial Sequence: Synthetic polypeptide
QVQLVESGGGVVQPGRSLRLSCAASGFTFDNYALHWVRQAPGKGLEWVALISYDAGNKYYADSVKGRFTISRDNSKNTLYLQMNSLRAEDTAVYYCAKHMSMQEGAVTGEGQAAKEFIAWLVKGFVRADLVGDAFDVWGQGTLVTVSS

SEQ ID NO: 77 - protein, 148 aa, synthetic construct
  REGION 1..148: note = Description of Artificial Sequence: Synthetic polypeptide
QVQLVESGGGVVQPGRSLRLSCAASGFPFSSYAMHWVRQAPGKGLEWVAVISYDRSNKYYADSVKGRFTISRDNSKNTLYLQMNSLRAEDTAVYYCAKHMSMQEGAVTGYGQAAKEFIAWLVKGFVRADLVGDAFDVWGQGTLVTVSS

SEQ ID NO: 78 - protein, 203 aa, synthetic construct
  REGION 1..203: note = Description of Artificial Sequence: Synthetic polypeptide
MSVPTQVLGLLLLWLTDARCQSVLTQPPSVSAAPGQKVTISCSGSTSNIANNYVSWYQQLPGTAPKLLIYANNRRPSGIPDRFSGSKSGTSATLGITGLQTGDEADYYCGAWDVRLDVGVFGGGTKLTVLGQPKAAPSVTLFPPSSEELQANKATLVCLISDFYPGAVTVAWKADSSPVKAGVETTTPSKQSNNKYAASSYLS

SEQ ID NO: 79 - protein, 236 aa, synthetic construct
  REGION 1..236: note = Description of Artificial Sequence: Synthetic polypeptide
MSVPTQVLGLLLLWLTDARCQSVLTQPPSVSAAPGQKVTISCSGSTSNIEKNYVSWYQQLPGTAPKLLIYGNDQRPSGIPDRFSGSKSGTSATLGITGLQTGDEADYYCGTWENRLSAVVFGGGTKLTVLGQPKAAPSVTLFPPSSEELQANKATLVCLISDFYPGAVTVAWKADSSPVKAGVETTTPSKQSNNKYAASSYLSLTPEQWKSHRSYSCQVTHEGSTVEKTVAPTECS

SEQ ID NO: 80 - protein, 236 aa, synthetic construct
  REGION 1..236: note = Description of Artificial Sequence: Synthetic polypeptide
MSVPTQVLGLLLLWLTDARCQSVLTQPPSVSAAPGQKVTISCSGSSSSIGNNYVSWYQQLPGTAPKLLIYANNKRPSGIPDRFSGSKSGTSATLGITGLQTGDEADYYCATWSSSPRGWVFGGGTKLTVLGQPKAAPSVTLFPPSSEELQANKATLVCLISDFYPGAVTVAWKADSSPVKAGVETTTPSKQSNNKYAASSYLSLTPEQWKSHRSYSCQVTHEGSTVEKTVAPTECS

SEQ ID NO: 81 - protein, 236 aa, synthetic construct
  REGION 1..236: note = Description of Artificial Sequence: Synthetic polypeptide
MSVPTQVLGLLLLWLTDARCQSVLTQPPSVSAAPGQKVTISCSGISSNIGNNYVSWYQQLPGTAPKLLIYDDDQRPSGIPDRFSGSKSGTSATLGITGLQTGDEADYYCGTWDNILSAAVFGGGTKLTVLGQPKAAPSVTLFPPSSEELQANKATLVCLISDFYPGAVTVAWKADSSPVKAGVETTTPSKQSNNKYAASSYLSLTPEQWKSHRSYSCQVTHEGSTVEKTVAPTECS

SEQ ID NO: 82 - protein, 236 aa, synthetic construct
  REGION 1..236: note = Description of Artificial Sequence: Synthetic polypeptide
MSVPTQVLGLLLLWLTDARCQSVLTQPPSVSAAPGQKVTISCSGSSSNIENNDVSWYQQLPGTAPKLLIYGNDQRPSGIPDRFSGSKSGTSATLGITGLQTGDEADYYCGTWDNTLSAGVFGGGTKLTVLGQPKAAPSVTLFPPSSEELQANKATLVCLISDFYPGAVTVAWKADSSPVKAGVETTTPSKQSNNKYAASSYLSLTPEQWKSHRSYSCQVTHEGSTVEKTVAPTECS

SEQ ID NO: 83 - protein, 235 aa, synthetic construct
  REGION 1..235: note = Description of Artificial Sequence: Synthetic polypeptide
MSVPTQVLGLLLLWLTDARCQSVLTQPPSVSAAPGQKVTISCSGSRSNIGKNYVSWYQQLPGTAPKLLIYENNERPSGIPDRFSGSKSGTSATLGITGLQTGDEADYYCSSYTTSNTQVFGGGTKLTVLGQPKAAPSVTLFPPSSEELQANKATLVCLISDFYPGAVTVAWKADSSPVKAGVETTTPSKQSNNKYAASSYLSLTPEQWKSHRSYSCQVTHEGSTVEKTVAPTECS

SEQ ID NO: 84 - protein, 236 aa, synthetic construct
  REGION 1..236: note = Description of Artificial Sequence: Synthetic polypeptide
MSVPTQVLGLLLLWLTDARCQSVLTQPPSVSAAPGQKVTISCSGSSSNIGNNVVSWYQQLPGTAPKLLIYDNDKRRSGIPDRFSGSKSGTSATLGITGLQTGDEADYYCGSWDTSLSVWVFGGGTKLTVLGQPKAAPSVTLFPPSSEELQANKATLVCLISDFYPGAVTVAWKADSSPVKAGVETTTPSKQSNNKYAASSYLSLTPEQWKSHRSYSCQVTHEGSTVEKTVAPTECS

SEQ ID NO: 85 - protein, 261 aa, synthetic construct
  REGION 1..261: note = Description of Artificial Sequence: Synthetic polypeptide
HAEGTFTSDVSSYLEGQAAKEFIAWLVKGRGGGGGSGGGGSGGGGSQSVLTQPPSVSAAPGQKVTISCSGSRSNIGKNYVSWYQQLPGTAPKLLIYENNERPSGIPDRFSGSKSGTSATLGITGLQTGDEADYYCSSYTTSNTQVFGGGTKLTVLGQPKAAPSVTLFPPSSEELQANKATLVCLISDFYPGAVTVAWKADSSPVKAGVETTTPSKQSNNKYAASSYLSLTPEQWKSHRSYSCQVTHEGSTVEKTVAPTECS

SEQ ID NO: 86 - protein, 262 aa, synthetic construct
  REGION 1..262: note = Description of Artificial Sequence: Synthetic polypeptide
HAEGTFTSDVSSYLEGQAAKEFIAWLVKGRGGGGGSGGGGSGGGGSQSVLTQPPSVSAAPGQKVTISCSGISSNIGNNYVSWYQQLPGTAPKLLIYDDDQRPSGIPDRFSGSKSGTSATLGITGLQTGDEADYYCGTWDNILSAAVFGGGTKLTVLGQPKAAPSVTLFPPSSEELQANKATLVCLISDFYPGAVTVAWKADSSPVKAGVETTTPSKQSNNKYAASSYLSLTPEQWKSHRSYSCQVTHEGSTVEKTVAPTECS

SEQ ID NO: 87 - protein, 262 aa, synthetic construct
  REGION 1..262: note = Description of Artificial Sequence: Synthetic polypeptide
HGEGTFTSDVSSYLEEQAAKEFIAWLVKGGGGGGGSGGGGSGGGGSQSALTQPASVSGSPGQSITISCTGTSNDIGTYNYVSWYQQHPGKAPKLMIYDVSGRPSGVSNRFSGSKSGNTASLTISGLQAEDEADYYCSSYTTSSTEVFGGGTKLTVLGQPKAAPSVTLFPPSSEELQANKATLVCLISDFYPGAVTVAWKADSSPVKAGVETTTPSKQSNNKYAASSYLSLTPEQWKSHRSYSCQVTHEGSTVEKTVAPTECS

SEQ ID NO: 88 - protein, 262 aa, synthetic construct
  REGION 1..262: note = Description of Artificial Sequence: Synthetic polypeptide
HAEGTFTSDVSSYLEGQAAKEFIAWLVKGRGGGGGSGGGGSGGGGSQSALTQPASVSGSPGQSITISCTGTSNDIGTYNYVSWYQQHPGKAPKLMIYDVSGRPSGVSNRFSGSKSGNTASLTISGLQAEDEADYYCSSYTTSSTEVFGGGTKLTVLGQPKAAPSVTLFPPSSEELQANKATLVCLISDFYPGAVTVAWKADSSPVKAGVETTTPSKQSNNKYAASSYLSLTPEQWKSHRSYSCQVTHEGSTVEKTVAPTECS

SEQ ID NO: 89 - protein, 216 aa, synthetic construct
  REGION 1..216: note = Description of Artificial Sequence: Synthetic polypeptide
QSVLTQPPSVSAAPGQKVTISCSGSSSNIADNYVSWYQQLPGTAPKLLIYDNNKRPSGIPDRFSGSKSGTSATLGITGLQTGDEADYYCGTWDNYLGAGVFGGGTKLTVLGQPKAAPSVTLFPPSSEELQANKATLVCLISDFYPGAVTVAWKADSSPVKAGVETTTPSKQSNNKYAASSYLSLTPEQWKSHRSYSCQVTHEGSTVEKTVAPTECS

SEQ ID NO: 90 - protein, 109 aa, synthetic construct
  REGION 1..109: note = Description of Artificial Sequence: Synthetic polypeptide
EIVMTQSPATLSVSPGERATLSCRASHSVSSDLAWYQQKPGQAPRLLIYSASSRATGIPARFSGSGSGTEFTLTISSLQSEDFAVYYCQQYNNWPPASTFGGGTKVEIK

SEQ ID NO: 91 - protein, 106 aa, synthetic construct
  REGION 1..106: note = Description of Artificial Sequence: Synthetic polypeptide
EIVMTQSPATLSVSPGERATLSCSASQSVSTKLAWYQQKPGQAPRLLIYGASTRAKGIPARFSGSGSGTEFTLTISLQSEDFAVYYCQHYHNWPLTFGGGTKVEIK

SEQ ID NO: 92 - protein, 110 aa, synthetic construct
  REGION 1..110: note = Description of Artificial Sequence: Synthetic polypeptide
QSVLTQPPSVSAAPGQKVTISCSGTTSNIANNFVSWYQQLPGTAPKLLIYDHNKRPSGIPDRFSGSKSGTSATLGITGLQTGDEADYYCGTWDTSLSAGAFGGGTKLTVL

SEQ ID NO: 93 - protein, 110 aa, synthetic construct
  REGION 1..110: note = Description of Artificial Sequence: Synthetic polypeptide
QSVLTQPPSVSAAPGQKVTISCSGSGSNIGNNDVSWYQQLPGTAPKLLIYDNDKRPAGIPDRFSGSKSGTSATLGITGLQTGDEADYYCGTWDTSLSNYVFGGGTKLTVL

SEQ ID NO: 94 - protein, 110 aa, synthetic construct
  REGION 1..110: note = Description of Artificial Sequence: Synthetic polypeptide
QSVLTQPPSVSAAPGQKVTISCSGSSSNIGNTYVSWYQQLPGTAPKLLIYDDYKRPSGIPDRFSGSKSGTSATLGITGLQTGDEADYYCATWDATLNTGVFGGGTKLTVL

SEQ ID NO: 95 - protein, 110 aa, synthetic construct
  REGION 1..110: note = Description of Artificial Sequence: Synthetic polypeptide
QSVLTQPPSVSAAPGQKVTISCSGSSSNIGNEYVSWYQQLPGTAPKLLIYDNNKRVSGIPDRFSGSKSGTSATLGITGLQTGDEADYYCATWDTSLNVGVFGGGTKLTVL

SEQ ID NO: 96 - protein, 110 aa, synthetic construct
  REGION 1..110: note = Description of Artificial Sequence: Synthetic polypeptide
QSVLTQPPSVSAAPGQKVTISCSGTSSNIGNNDVSWYQQLPGTAPKLLIYENNKRHSGIPDRFSGSKSGTSATLGITGLQTGDEADYYCLTWDHSLTAYVFGGGTKLTVL

SEQ ID NO: 97 - protein, 110 aa, synthetic construct
  REGION 1..110: note = Description of Artificial Sequence: Synthetic polypeptide
QSVLTQPPSVSAAPGQKVTISCSGTTSNIANNFVSWYQQLPGTAPKLLIYDNNKRPPGIPDRFSGSKSGTSATLGITGLQTGDEADYYCGTWDTSLSVGMFGGGTKLTVL

SEQ ID NO: 98 - protein, 110 aa, synthetic construct
  REGION 1..110: note = Description of Artificial Sequence: Synthetic polypeptide
QSVLTQPPSVSAAPGQKVTISCSGSSSNIGNNPVSWYQQLPGTAPKLLIYENDNRPSGIPDRFSGSKSGTSATLGITGLQTGDEADYYCATWDRGLSTGVFGGGTKLTVL

SEQ ID NO: 99 - protein, 110 aa, synthetic construct
  REGION 1..110: note = Description of Artificial Sequence: Synthetic polypeptide
QSVLTQPPSVSAAPGQKVTISCSGSSSNIGNNYLSWYQQLPGTAPKLLIYENNKRPSGIPDRFSGSKSGTSATLGITGLQTGDEADYYCGIWDRSLSAWVFGGGTKLTVL

SEQ ID NO: 100 - protein, 110 aa, synthetic construct
  REGION 1..110: note = Description of Artificial Sequence: Synthetic polypeptide
QSVLTQPPSVSAAPGQKVTISCSGSSSNIADNYVSWYQQLPGTAPKLLIYENNRRPSGIPDRFSGSKSGTSATLGITGLQTGDEADYYCGTWDVSLSVGMFGGGTKLTVL

SEQ ID NO: 101 - protein, 110 aa, synthetic construct
  REGION 1..110: note = Description of Artificial Sequence: Synthetic polypeptide
QSVLTQPPSVSAAPGQKVTISCSGSSSNIGNQYVSWYQQLPGTAPKLLIYDDHKRPSGIPDRFSGSKSGTSATLGITGLQTGDEADYYCGTWDTSLSVGEFGGGTKLTVL

SEQ ID NO: 102 - protein, 110 aa, synthetic construct
  REGION 1..110: note = Description of Artificial Sequence: Synthetic polypeptide
QSVLTQPPSVSAAPGQKVTISCSGSSSNIGKRSVSWYQQLPGTAPKLLIYDNNKRASGIPDRFSGSKSGTSATLGITGLQTGDEADYYCVTWDRSLSAGVFGGGTKLTVL

SEQ ID NO: 103 - protein, 110 aa, synthetic construct
  REGION 1..110: note = Description of Artificial Sequence: Synthetic polypeptide
QSVLTQPPSVSAAPGQKVTISCSGSSSNIENNDVSWYQQLPGTAPKLLIYDFNKRPSGIPDRFSGSKSGTSATLGITGLQTGDEADYYCGTWDTSLSVGMFGGGTKLTVL

SEQ ID NO: 104 - protein, 110 aa, synthetic construct
  REGION 1..110: note = Description of Artificial Sequence: Synthetic polypeptide
QSVLTQPPSVSAAPGQKVTISCSGSSSNIGNNDVSWYQQLPGTAPKLLIYENTKRPSGIPDRFSGSKSGTSATLGITGLQTGDEADYYCGTWDAGLSTGVFGGGTKLTVL

SEQ ID NO: 105 - protein, 110 aa, synthetic construct
  REGION 1..110: note = Description of Artificial Sequence: Synthetic polypeptide
QSVLTQPPSVSAAPGQKVTISCSGSSSNIGNHDVSWYQQLPGTAPKLLIYDNNKRHSGIPDRFSGSKSGTSATLGITGLQTGDEADYYCGTWDTSLSAGVFGGGTKLTVL

SEQ ID NO: 106 - protein, 110 aa, synthetic construct
  REGION 1..110: note = Description of Artificial Sequence: Synthetic polypeptide
QSVLTQPPSVSAAPGQKVTISCSGSSSNIADNYVSWYQQLPGTAPKLLIYDNNKRASGIPDRFSGSKSGTSATLGITGLQTGDEADYYCATWDNRLSAGVFGGGTKLTVL

SEQ ID NO: 107 - protein, 110 aa, synthetic construct
  REGION 1..110: note = Description of Artificial Sequence: Synthetic polypeptide
QSVLTQPPSVSAAPGQKVTISCSGSGSNIGNNDVSWYQQLPGTAPKLLIYDNNKRASGIPDRFSGSKSGTSATLGITGLQTGDEADYYCGTWDRGPNTGVFGGGTKLTVL

SEQ ID NO: 108 - protein, 110 aa, synthetic construct
  REGION 1..110: note = Description of Artificial Sequence: Synthetic polypeptide
QSVLTQPPSVSAAPGQKVTISCSGSSSNIGNNDVSWYQQLPGTAPKLLIYDDDKRPSGIPDRFSGSKSGTSATLGITGLQTGDEADYYCGTWDTSLSVGEFGGGTKLTVL

SEQ ID NO: 109 - protein, 110 aa, synthetic construct
  REGION 1..110: note = Description of Artificial Sequence: Synthetic polypeptide
QSVLTQPPSVSAAPGQKVTISCSGSSSNIGSKYVSWYQQLPGTAPKLLIYDNNKRPSGIPDRFSGSKSGTSATLGITGLQTGDEADYYCGTWDISPSAWVFGGGTKLTVL

SEQ ID NO: 110 - protein, 110 aa, synthetic construct
  REGION 1..110: note = Description of Artificial Sequence: Synthetic polypeptide
QSVLTQPPSVSAAPGQKVTISCSGSSSNIGSDYVSWYQQLPGTAPKLLIYDNNKRSSGIPDRFSGSKSGTSATLGITGLQTGDEADYYCGTWDESLRSWVFGGGTKLTVL

SEQ ID NO: 111 - protein, 110 aa, synthetic construct
  REGION 1..110: note = Description of Artificial Sequence: Synthetic polypeptide
QSVLTQPPSVSAAPGQKVTISCSGSSSNIGSNYISWYQQLPGTAPKLLIYDNDKRPAGIPDRFSGSKSGTSATLGITGLQTGDEADYYCGTWDTSLSVGEFGGGTKLTVL

SEQ ID NO: 112 - protein, 116 aa, synthetic construct
  REGION 1..116: note = Description of Artificial Sequence: Synthetic polypeptide
EVQLVESGGGLVQPGGSLRLSCAASGFTCGDYTMGWFRQAPGKEREFLAAITSGGATTYDDNRKSRFTISADNSKNTAYLQMNSLKPEDTAVYYCWAALDGYGGRWGQGTLVTVSS

SEQ ID NO: 113 - protein, 116 aa, synthetic construct
  REGION 1..116: note = Description of Artificial Sequence: Synthetic polypeptide
EVQLVESGGGLVQPGGSLRLSCAASGRTFRINRMGWFRQAPGKEREWVSTICSRGDTYYADSVKGRFTISADNSKNTAYLQMNSLKPEDTAVYYCAATLDGYSGSWGQGTLVTVSS

SEQ ID NO: 114 - protein, 115 aa, synthetic construct
  REGION 1..115: note = Description of Artificial Sequence: Synthetic polypeptide
EVQLVESGGGLVQPGGSLRLSCAASGRDFRVKNMGWFRQAPGKEREFVARITWNGGSAYYADSVKGRFTISADNSKNTAYLQMNSLKPEDTAVYYCAARILSRNWGQGTLVTVSS

SEQ ID NO: 115 - protein, 116 aa, synthetic construct
  REGION 1..116: note = Description of Artificial Sequence: Synthetic polypeptide
EVQLVESGGGLVQPGGSLRLSCAASGFTFSFYTMGWFRQAPGKEREFVAAISSGGRTSYADSVKGRFTISADNSKNTAYLQMNSLKPEDTAVYYCAAALDGYEGSWGQGTLVTVSS

SEQ ID NO: 116 - protein, 116 aa, synthetic construct
  REGION 1..116: note = Description of Artificial Sequence: Synthetic polypeptide
EVQLVESGGGLVQPGGSLRLSCAASGFTFSFYAMGWFRQAPGKEREFVAAISSGGRTRYADNVKGRFTISADNSKNTAYLQMNSLKPEDTAVYYCSAALDGYNGIWGQGTLVTVSS

SEQ ID NO: 117 - protein, 123 aa, synthetic construct
  REGION 1..123: note = Description of Artificial Sequence: Synthetic polypeptide
EVQLVESGGGLVQPGGSLRLSCAASGHTSDTYIMGWFRQAPGKEREFVSLINWSSGKTIYADSVKGRFTISADNSKNTAYLQMNSLKPEDTAVYYCAKGDYRGGYYYPQTSQWGQGTLVTVSS

SEQ ID NO: 118 - protein, 116 aa, synthetic construct
  REGION 1..116: note = Description of Artificial Sequence: Synthetic polypeptide
EVQLVESGGGLVQPGGSLRLSCAASGFTFSSYPMGWFRQAPGKEREFVATIPSGGSTYYADSVKGRFTISADNSKNTAYLQMNSLKPEDTAVYYCAAALDGYNGSWGQGTLVTVSS

SEQ ID NO: 119 - protein, 116 aa, synthetic construct
  REGION 1..116: note = Description of Artificial Sequence: Synthetic polypeptide
EVQLVESGGGLVQPGGSLRLSCAASGFTFGEFTMGWFRQAPGKERERVATITSGGSTNYADSVKGRFTISADNSKNTAYLQMNSLKPEDTAVYYCAAVVDDYSGSWGQGTLVTVSS

SEQ ID NO: 120 - protein, 117 aa, synthetic construct
  REGION 1..117: note = Description of Artificial Sequence: Synthetic polypeptide
EVQLVESGGGLVQPGGSLRLSCAASGFTDGIDAMGWFRQAPGKEREVVAGIAWGDGITYYADSVKGRFTISADNSKNTAYLQMNSLKPEDTAVYYCAASYNVYYNNWGQGTLVTVSS

SEQ ID NO: 121 - protein, 122 aa, synthetic construct
  REGION 1..122: note = Description of Artificial Sequence: Synthetic polypeptide
EVQLVESGGGLVQPGGSLRLSCAASGRTFSSGVMGWFRQAPGKEREFVAAINRSGSTFYADSVKGRFTISADNSKNTAYLQMNSLKPEDTAVYYCAKTKRTGIFTTARMVDWGQGTLVTVSS

SEQ ID NO: 122 - protein, 126 aa, synthetic construct
  REGION 1..126: note = Description of Artificial Sequence: Synthetic polypeptide
EVQLVESGGGLVQPGGSLRLSCAASGVTLDDYAMGWFRQAPGKEREFVAAINRSGSITYYADSVKGRFTISADNSKNTAYLQMNSLKPEDTAVYYCAAYYTDYDEALEETRGSYDWGQGTLVTVSS

SEQ ID NO: 123 - protein, 121 aa, synthetic construct
  REGION 1..121: note = Description of Artificial Sequence: Synthetic polypeptide
EVQLVESGGGLVQPGGSLRLSCAASGLTFGIYAMGWFRQAPGKEREFVATISRSGASTYYADSVKGRFTISADNSKNTAYLQMNSLKPEDTAVYYCAAIVTYNDYDRGHDWGQGTLVTVSS

SEQ ID NO: 124 - protein, 122 aa, synthetic construct
  REGION 1..122: note = Description of Artificial Sequence: Synthetic polypeptide
EVQLVESGGGLVQPGGSLRLSCAASGFTFSSDGMGWFRQAPGKERELVAAINRSGSTFYADSVKGRFTISADNSKNTAYLQMNSLKPEDTAVYYCAKTARPGIFTTAPVEDWGQGTLVTVSS

SEQ ID NO: 125 - protein, 116 aa, synthetic construct
  REGION 1..116: note = Description of Artificial Sequence: Synthetic polypeptide
EVQLVESGGGLVQPGGSLRLSCAASGFTCGNYTMGWFRQAPGKERESVASITSGGRTNYADSVKGRFTISADNSKNTAYLQMNSLKPEDTAVYYCAATLDGYTGSWGQGTLVTVSS

SEQ ID NO: 126 - protein, 116 aa, synthetic construct
  REGION 1..116: note = Description of Artificial Sequence: Synthetic polypeptide
EVQLVESGGGLVQPGGSLRLSCAASGFTFNYYPMGWFRQAPGKEREWVATISRGGGTYYADNVKGRFTISADNSKNTAYLQMNSLKPEDTAVYYCSAALDGYSGIWGQGTLVTVSS

SEQ ID NO: 127 - protein, 123 aa, synthetic construct
  REGION 1..123: note = Description of Artificial Sequence: Synthetic polypeptide
EVQLVESGGGLVQPGGSLRLSCAASGIIGSFRTMGWFRQAPGKEREFVGFITGSGGTTYYADSVKGRFTISADNSKNTAYLQMNSLKPEDTAVYYCAAARRYGNLYNTNNYDWGQGTLVTVSS

SEQ ID NO: 128 - protein, 120 aa, synthetic construct
  REGION 1..120: note = Description of Artificial Sequence: Synthetic polypeptide
EVQLVESGGGLVQPGGSLRLSCAASGITFRFKAMGWFRQAPGKEREFVAAISWRGGSTNYADSVKGRFTISADNSKNTAYLQMNSLKPEDTAVYYCAAATLGEPLVKYTWGQGTLVTVSS

SEQ ID NO: 129 - protein, 124 aa, synthetic construct
  REGION 1..124: note = Description of Artificial Sequence: Synthetic polypeptide
EVQLVESGGGLVQPGGSLRLSCAASGSFFSINAMGWFRQAPGKEREFVAGISSKGGSSTYYADSVKGRFTISADNSKNTAYLQMNSLKPEDTAVYYCAAHRIVVGGTSVGDWRWGQGTLVTVSS

SEQ ID NO: 130 - protein, 125 aa, synthetic construct
  REGION 1..125: note = Description of Artificial Sequence: Synthetic polypeptide
EVQLVESGGGLVQPGGSLRLSCAASGSRFSGRFNILNMGWFRQAPGKEREFVAAISRSGDTTYYADSVKGRFTISADNSKNTAYLQMNSLKPEDTAVYYCAASLRNSGSNVEGRWGQGTLVTVSS

SEQ ID NO: 131 - protein, 117 aa, synthetic construct
  REGION 1..117: note = Description of Artificial Sequence: Synthetic polypeptide
EVQLVESGGGLVQPGGSLRLSCAASGGTSNSYRMGWFRQAPGKEREFVAVISWTGGSTYYADSVKGRFTISADNSKNTAYLQMNSLKPEDTAVYYCAVALDGYSGSWGQGTLVTVSS

SEQ ID NO: 132 - protein, 116 aa, synthetic construct
  REGION 1..116: note = Description of Artificial Sequence: Synthetic polypeptide
EVQLVESGGGLVQPGGSLRLSCAASGFNIGTYTMGWFRQAPGKEREFVAAIGSNGLANYADNVKGRFTISADNSKNTAYLQMNSLKPEDTAVYYCSAALDGYSGTWGQGTLVTVSS

SEQ ID NO: 133 - protein, 116 aa, synthetic construct
  REGION 1..116: note = Description of Artificial Sequence: Synthetic polypeptide
EVQLVESGGGLVQPGGSLRLSCAASGRTFSVYAMGWFRQAPGKEREFVAGIHSDGSTLYADSVKGRFTISADNSKNTAYLQMNSLKPEDTAVYYCAAVLDGYMGTWGQGTLVTVSS

SEQ ID NO: 134 - protein, 127 aa, synthetic construct
  REGION 1..127: note = Description of Artificial Sequence: Synthetic polypeptide
EVQLVESGGGLVQPGGSLRLSCAASGNIKSIDVMGWFRQAPGKERELVAAVRWSGGITWYADSVKGRFTISADNSKNTAYLQMNSLKPEDTAVYYCAAVVYYGDWEGSEPVQHEYDWGQGTLVTVSS

SEQ ID NO: 135 - protein, 114 aa, synthetic construct
  REGION 1..114: note = Description of Artificial Sequence: Synthetic polypeptide
EVQLVESGGGLVQPGGSLRLSCAASGFTFSNYAMGWFRQAPGKEREFVAAIYCSDGSTQYADSVKGRFTISADNSKNTAYLQMNSLKPEDTAVYYCAEALDGYWGQGTLVTVSS

SEQ ID NO: 136 - protein, 125 aa, synthetic construct
  REGION 1..125: note = Description of Artificial Sequence: Synthetic polypeptide
EVQLVESGGGLVQPGGSLRLSCAASGYTFRAYAMGWFRQAPGKEREMVAAMRWSGGITWYADSVKGRFTISADNSKNTAYLQMNSLKPEDTAVYYCAAQGSLYDDYDGLPIKYDWGQGTLVTVSS

SEQ ID NO: 137 - protein, 116 aa, synthetic construct
  REGION 1..116: note = Description of Artificial Sequence: Synthetic polypeptide
EVQLVESGGGLVQPGGSLRLSCAASGLTFSSYAMGWFRQAPGKERECVTAIFSDGGTYYADNVKGRFTISADNSKNTAYLQMNSLKPEDTAVYYCAAALDGYNGYWGQGTLVTVSS

SEQ ID NO: 138 - protein, 125 aa, synthetic construct
  REGION 1..125: note = Description of Artificial Sequence: Synthetic polypeptide
EVQLVESGGGLVQPGGSLRLSCAASGIHFAISTMGWFRQAPGKEREIVTAINWSGARTYYADSVKGRFTISADNSKNTAYLQMNSLKPEDTAVYYCAAKFVNTDSTWSRSEMYTWGQGTLVTVSS

SEQ ID NO: 139 - protein, 116 aa, synthetic construct
  REGION 1..116: note = Description of Artificial Sequence: Synthetic polypeptide
EVQLVESGGGLVQPGGSLRLSCAASGLTFTSYAMGWFRQAPGKEREGVAVIDSDGTTYYADSVKGRFTISADNSKNTAYLQMNSLKPEDTAVYYCAAYLDGYSGSWGQGTLVTVSS

SEQ ID NO: 140 - protein, 117 aa, synthetic construct
  REGION 1..117: note = Description of Artificial Sequence: Synthetic polypeptide
EVQLVESGGGLVQPGGSLRLSCAASGRTFSSLPMGWFRQAPGKERELVAIRWSGGSTVYADSVKGRFTISADNSKNTAYLQMNSLKPEDTAVYYCAAIAYEEGVYRWGQGTLVTVSS

SEQ ID NO: 141 - protein, 117 aa, synthetic construct
  REGION 1..117: note = Description of Artificial Sequence: Synthetic polypeptide
EVQLVESGGGLVQPGGSLRLSCAASGRTFSSGVMGWFRQAPGKEREFVAAINRSGSTFYADSVKGRFTISADNSKNTAYLQMNSLKPEDTAVYYCAKTKRTGIFTTWGQGTLVTVSS

SEQ ID NO: 142 - protein, 116 aa, synthetic construct
  REGION 1..116: note = Description of Artificial Sequence: Synthetic polypeptide
EVQLVESGGGLVQPGGSLRLSCAASGFTFSSYAMGWFRQAPGKERELVAAISSGGSTSYADSVKGRFTISADNSKNTAYLQMNSLKPEDTAVYYCAAAMDGYSGSWGQGTLVTVSS

SEQ ID NO: 143 - protein, 123 aa, synthetic construct
  REGION 1..123: note = Description of Artificial Sequence: Synthetic polypeptide
EVQLVESGGGLVQPGGSLRLSCAASGFTDGIDAMGWFRQAPGKEREYVAAISGSGSITNYADSVKGRFTISADNSKNTAYLQMNSLKPEDTAVYYCAANGIESYGWGNRHFNWGQGTLVTVSS

SEQ ID NO: 144 - protein, 121 aa, synthetic construct
  REGION 1..121: note = Description of Artificial Sequence: Synthetic polypeptide
EVQLVESGGGLVQPGGSLRLSCAASGFTDGIDAMGWFRQAPGKEREFVAAIRWSGGITWYADSVKGRFTISADNSKNTAYLQMNSLKPEDTAVYYCAAAIFDVTDYERADWGQGTLVTVSS

SEQ ID NO: 145 - protein, 121 aa, synthetic construct
  REGION 1..121: note = Description of Artificial Sequence: Synthetic polypeptide
EVQLVESGGGLVQPGGSLRLSCAASGFAFSGYAMGWFRQAPGKEREFVAAISWSGGITWYADSVKGRFTISADNSKNTAYLQMNSLKPEDTAVYYCAFVTTNSDYDLGRDWGQGTLVTVSS

SEQ ID NO: 146 - protein, 117 aa, synthetic construct
  REGION 1..117: note = Description of Artificial Sequence: Synthetic polypeptide
EVQLVESGGGLVQPGGSLRLSCAASGIPASIRTMGWFRQAPGKEREGVSWISSSDGSIYYADSVKGRFTISADNSKNTAYLQMNSLKPEDTAVYYCVAALDGYSGSWGQGTLVTVSS

SEQ ID NO: 147 - protein, 119 aa, synthetic construct
  REGION 1..119: note = Description of Artificial Sequence: Synthetic polypeptide
EVQLVESGGGLVQPGGSLRLSCAASGRTFSSLPMGWFRQAPGKERELVAIRWSGGSTVYADSVKGRFTISADNSKNTAYLQMNSLKPEDTAVYYCAAIAYEEGVYRWDWGQGTLVTVSS

SEQ ID NO: 148 - protein, 117 aa, synthetic construct
  REGION 1..117: note = Description of Artificial Sequence: Synthetic polypeptide
EVQLVESGGGLVQPGGSLRLSCAASGFNSGSYTMGWFRQAPGKEREGVSWISTTDGSTYYADSVKGRFTISADNSKNTAYLQMNSLKPEDTAVYYCAAALDGYSGIWGQGTLVTVSS

SEQ ID NO: 149 - protein, 116 aa, synthetic construct
  REGION 1..116: note = Description of Artificial Sequence: Synthetic polypeptide
EVQLVESGGGLVQPGGSLRLSCAASGFTFSVYAMGWFRQAPGKEREFVTAIDSESRTLYADSVKGRFTISADNSKNTAYLQMNSLKPEDTAVYYCAALLDGYLGTWGQGTLVTVSS

SEQ ID NO: 150 - protein, 122 aa, synthetic construct
  REGION 1..122: note = Description of Artificial Sequence: Synthetic polypeptide
EVQLVESGGGLVQPGGSLRLSCAASGSVFKINVMGWFRQAPGKEREFLGSILWSDDSTNYADSVKGRFTISADNSKNTAYLQMNSLKPEDTAVYYCAANLKQGSYGYRFNDWGQGTLVTVSS

SEQ ID NO: 151 - protein, 122 aa, synthetic construct
  REGION 1..122: note = Description of Artificial Sequence: Synthetic polypeptide
EVQLVESGGGLVQPGGSLRLSCAASGTIVNIHVMGWFRQAPGKERELVAAITSGGSTSYADNVKGRFTISADNSKNTAYLQMNSLKPEDTAVYYCAASAIGSGALRHFEYDWGQGTLVTVSS

SEQ ID NO: 152 - protein, 117 aa, synthetic construct
  REGION 1..117: note = Description of Artificial Sequence: Synthetic polypeptide
EVQLVESGGGLVQPGGSLRLSCAASGRSLGTYHMGWFRQAPGKEREGVSWISSSDGSTYYADSVKGRFTISADNSKNTAYLQMNSLKPEDTAVYYCAVVLDGYSGSWGQGTLVTVSS

SEQ ID NO: 153 - protein, 124 aa, synthetic construct
  REGION 1..124: note = Description of Artificial Sequence: Synthetic polypeptide
EVQLVESGGGLVQPGGSLRLSCAASGFTFDDTGMGWFRQAPGKEREFVAAIRWSGKETWYADSVKGRFTISADNSKNTAYLQMNSLKPEDTAVYYCAAEDPSMYYTLEEYEYDWGQGTLVTVSS

SEQ ID NO: 154 - protein, 117 aa, synthetic construct
  REGION 1..117: note = Description of Artificial Sequence: Synthetic polypeptide
EVQLVESGGGLVQPGGSLRLSCAASGFTFSSYVMGWFRQAPGKERECVAAISSSDGRTYYADSVKGRFTISADNSKNTAYLQMNSLKPEDTAVYYCAAALDGYSGNWGQGTLVTVSS

SEQ ID NO: 155 - protein, 119 aa, synthetic construct
  REGION 1..119: note = Description of Artificial Sequence: Synthetic polypeptide
EVQLVESGGGLVQPGGSLRLSCAASGSIFRVNVMGWFRQAPGKEREFIATIFSGGDTDYADSVKGRFTISADNSKNTAYLQMNSLKPEDTAVYYCAAIAHEEGVYRWDWGQGTLVTVSS

SEQ ID NO: 156 - protein, 116 aa, synthetic construct
  REGION 1..116: note = Description of Artificial Sequence: Synthetic polypeptide
EVQLVESGGGLVQPGGSLRLSCAASGFTCGDYTMGWFRQAPGKEREIVASITSGGRKNYADSVKGRFTISADNSKNTAYLQMNSLKPEDTAVYYCAAALDDYSGSWGQGTLVTVSS

SEQ ID NO: 157 - protein, 117 aa, synthetic construct
  REGION 1..117: note = Description of Artificial Sequence: Synthetic polypeptide
EVQLVESGGGLVQPGGSLRLSCAASGHSFGNFPMGWFRQAPGKEREVIAAIDWSGGSTFYADSVKGRFTISADNSKNTAYLQMNSLKPEDTAVYYCAAAKGIGVYGWGQGTLVTVSS

SEQ ID NO: 158 - protein, 125 aa, synthetic construct
  REGION 1..125: note = Description of Artificial Sequence: Synthetic polypeptide
EVQLVESGGGLVQPGGSLRLSCAASGSSFRFRAMGWFRQAPGKEREFVAAINRGGKISHYADSVKGRFTISADNSKNTAYLQMNSLKPEDTAVYYCAAYIRPDTYLSRDYRKYDWGQGTLVTVSS

SEQ ID NO: 159 - protein, 116 aa, synthetic construct
  REGION 1..116: note = Description of Artificial Sequence: Synthetic polypeptide
EVQLVESGGGLVQPGGSLRLSCAASGFTWGDYTMGWFRQAPGKEREGVAAIDSDGRTRYADSVKGRFTISADNSKNTAYLQMNSLKPEDTAVYYCAAALDGYSGSWGQGTLVTVSS

SEQ ID NO: 160 - protein, 121 aa, synthetic construct
  REGION 1..121: note = Description of Artificial Sequence: Synthetic polypeptide
EVQLVESGGGLVQPGGSLRLSCAASGNILSLNTMGWFRQAPGKEREFVAGISWSGGSTYYADSVKGRFTISADNSKNTAYLQMNSLKPEDTAVYYCAAIVTYSDYDLGNDWGQGTLVTVSS

SEQ ID NO: 161 - protein, 117 aa, synthetic construct
  REGION 1..117: note = Description of Artificial Sequence: Synthetic polypeptide
EVQLVESGGGLVQPGGSLRLSCAASGITFRRYDMGWFRQAPGKEREGVAYISSSDGSTYYADSVKGRFTISADNSKNTAYLQMNSLKPEDTAVYYCAAVLDDYSGGWGQGTLVTVSS

SEQ ID NO: 162 - protein, 118 aa, synthetic construct
  REGION 1..118: note = Description of Artificial Sequence: Synthetic polypeptide
EVQLVESGGGLVQPGGSLRLSCAASGLTLSNYAMGWFRQAPGKEREFVAAISRSGSSTYYADSVKGRFTISADNSKNTAYLQMNSLKPEDTAVYYCAAEMSGISGWDWGQGTLVTVSS

SEQ ID NO: 163 - protein, 123 aa, synthetic construct
  REGION 1..123: note = Description of Artificial Sequence: Synthetic polypeptide
EVQLVESGGGLVQPGGSLRLSCAASGYTTSINTMGWFRQAPGKEREVVAAISRTGGSTYYADSVKGRFTISADNSKNTAYLQMNSLKPEDTAVYYCAASAIGSGALRRFEYDWGQGTLVTVSS

SEQ ID NO: 164 - protein, 126 aa, synthetic construct
  REGION 1..126: note = Description of Artificial Sequence: Synthetic polypeptide
EVQLVESGGGLVQPGGSLRLSCAASGRTFSIDAMGWFRQAPGKEREFVAAIKPDGSITYYADSVKGRFTISADNSKNTAYLQMNSLKPEDTAVYYCAASASDYGLGLELFHDEYNWGQGTLVTVSS

SEQ ID NO: 165 - protein, 117 aa, synthetic construct
  REGION 1..117: note = Description of Artificial Sequence: Synthetic polypeptide
EVQLVESGGGLVQPGGSLRLSCAASGSIFSLNAMGWFRQAPGKERELVAGISSKGGSTYYADSVKGRFTISADNSKNTAYLQMNSLKPEDTAVYYCAAFRGIMRPDWGQGTLVTVSS

SEQ ID NO: 166 - protein, 117 aa, synthetic construct
  REGION 1..117: note = Description of Artificial Sequence: Synthetic polypeptide
EVQLVESGGGLVQPGGSLRLSCAASGFTFSSYRMGWFRQAPGKEREAVAAIASMGGLTYYADSVKGRFTISADNSKNTAYLQMNSLKPEDTAVYYCAAALDGYIGSWGQGTLVTVSS

SEQ ID NO: 167 - protein, 116 aa, synthetic construct
  REGION 1..116: note = Description of Artificial Sequence: Synthetic polypeptide
EVQLVESGGGLVQPGGSLRLSCAASGFTFGAFTMGWFRQAPGKERERVAAITCSGSTTYADSVKGRFTISADNSKNTAYLQMNSLKPEDTAVYYCSAALDGYNGSWGQGTLVTVSS

SEQ ID NO: 168 - protein, 117 aa, synthetic construct
  REGION 1..117: note = Description of Artificial Sequence: Synthetic polypeptide
EVQLVESGGGLVQPGGSLRLSCAASGIPSTIRAMGWFRQAPGKERESVGRIYWRDDNTYYADSVKGRFTISADNSKNTAYLQMNSLKPEDTAVYYCAAVLDGYSGSWGQGTLVTVSS

SEQ ID NO: 169 - protein, 128 aa, synthetic construct
  REGION 1..128: note = Description of Artificial Sequence: Synthetic polypeptide
EVQLVESGGGLVQPGGSLRLSCAASGFTDGIDAMGWFRQAPGKEREVVAGIAWGDGITYYADSVKGRFTISADNSKNTAYLQMNSLKPEDTAVYYCAASYNVYYNNYYYPISRDEYDWGQGTLVTVSS

SEQ ID NO: 170 - protein, 116 aa, synthetic construct
  REGION 1..116: note = Description of Artificial Sequence: Synthetic polypeptide
EVQLVESGGGLVQAGGSLRLSCAASGRTIVPYTMGWFRQAPGKEREVVASISWSGKSTYYADSVRGRFTISADNAKNTVYLQMNSLKPEDTAVYYCAAQRRWSQDWGQGTQVTVSS

SEQ ID NO: 171 - protein, 119 aa, synthetic construct
  REGION 1..119: note = Description of Artificial Sequence: Synthetic polypeptide
EVQLVESGGGLVQAGGSLRLSCAASGRTFSSYAMGWFRQAPGKEREFVAAISWSGGSTYYADSVKGRFTISADNAKNTVYLQMNSLKPEDTAVYYCAAVPTGRGERDYWGQGTQVTVSS

SEQ ID NO: 172 - protein, 119 aa, synthetic construct
  REGION 1..119: note = Description of Artificial Sequence: Synthetic polypeptide
EVQLVESGGGLVQAGGSLRLSCAASGFTFSNYAMGWFRQAPGKEREFVATITWSGSSTYYADSVKGRFTISADNAKNTVYLQMNSLKPEDTAVYYCAAVPRLYREYGYWGQGTQVTVSS

SEQ ID NO: 173 - protein, 120 aa, synthetic construct
  REGION 1..120: note = Description of Artificial Sequence: Synthetic polypeptide
EVQLVESGGGLVQAGGSLRLSCAASGSIFHINPMGWFRQAPGKEREFVAAINIFGTTNYADSVKGRFTISADNAKNTVYLQMNSLKPEDTAVYYCAAVDGGPLWDDGYDWGQGTQVTVSS

SEQ ID NO: 174 - protein, 120 aa, synthetic construct
  REGION 1..120: note = Description of Artificial Sequence: Synthetic polypeptide
EVQLVESGGGLVQAGGSLRLSCAASGSIFRINAMGWFRQAPGKEREGVASINIFGTTKYADSVKGRFTISADNAKNTVYLQMNSLKPEDTAVYYCSAVGWGPHNDDRYDWGQGTQVTVSS

SEQ ID NO: 175 - protein, 118 aa, synthetic construct
  REGION 1..118: note = Description of Artificial Sequence: Synthetic polypeptide
EVQLVESGGGLVQAGGSLRLSCAASGTTFSIYAMEWFRQAPGKERELVATISRSGGTTYYADSVGGRFTISADNAKNTVYLQMNSLKPEDTAVYYCAAASWYYRDDYWGQGTQVTVSS

SEQ ID NO: 176 - protein, 120 aa, synthetic construct
  REGION 1..120: note = Description of Artificial Sequence: Synthetic polypeptide
EVQLVESGGGLVQAGGSLRLSCAASGSIFRINAMGWFRQAPGKEREGVAAINNFGTTKYADSVKGRFTISADNAKNTVYLQMNSLKPEDTAVYYCSAVRWGPHNDDRYDWGQGTQVTVSS

SEQ ID NO: 177 - protein, 120 aa, synthetic construct
  REGION 1..120: note = Description of Artificial Sequence: Synthetic polypeptide
EVQLVESGGGLVQAGGSLRLSCAASGSIFRINAMGWFRQAPGKEREGVAAINNFGTTKYADSAKGRFTISADNAKNTVYLQMNSLKPEDTAVYYCAAVRWGPHNDDRYDWGQGTQVTVSS

SEQ ID NO: 178 - protein, 117 aa, synthetic construct
  REGION 1..117: note = Description of Artificial Sequence: Synthetic polypeptide
EVQLVESGGGLVQAGGSLRLSCAASGFILYGYAMGWFRQAPGKEREGVSSISPSDASTYYADSVKGRFTISADNAKNTVYLQMNSLKPEDTAVYYCAAVLNTYSDSWGQGTQVTVSS

SEQ ID NO: 179 - protein, 117 aa, synthetic construct
  REGION 1..117: note = Description of Artificial Sequence: Synthetic polypeptide
EVQLVESGGGLVQAGGSLRLSCAASGRTFSSYAMGWFRQAPGKEREGVTAISTSDGSTYYADSVKGRFTISADNAKNTVYLQMNSLKPEDTAVYYCAAARDGYSGSWGQGTQVTVSS

SEQ ID NO: 180 - protein, 118 aa, synthetic construct
  REGION 1..118: note = Description of Artificial Sequence: Synthetic polypeptide
EVQLVESGGGLVQAGGSLRLSCAASGYTITNSYRMGWFRQAPGKEREFVAGITMSGFNTRYADSVKGRFTISADNAKNTVYLQMNSLKPEDTAVYYCAANRGLAGPAWGQGTQVTVSS

SEQ ID NO: 181 - protein, 116 aa, synthetic construct
  REGION 1..116: note = Description of Artificial Sequence: Synthetic polypeptide
EVQLVESGGGLVQAGGSLRLSCAASGFTFDDNAMGWFRQAPGKEREFVSGISTSGSTTYYADSVKGRFTISADNAKNTVYLQMNSLKPEDTAVYYCAAAAGGYDYWGQGTQVTVSS

SEQ ID NO: 182 - protein, 117 aa, synthetic construct
  REGION 1..117: note = Description of Artificial Sequence: Synthetic polypeptide
EVQLVESGGGLVQAGGSLRLSCAASGRTFSYYHMGWFRQAPGKEREGVSWISSYYSSTYYADSESGRFTISADNAKNTVYLQMNSLKPEDTAVYYCAAVLDGYSCSWGQGTQVTVSS

SEQ ID NO: 183 - protein, 116 aa, synthetic construct
  REGION 1..116: note = Description of Artificial Sequence: Synthetic polypeptide
EVQLVESGGGLVQAGGSLRLSCAASGSPFRLYTMGWFRQAPGKEREVVAHIYSYGSINYADSVKGRFTISADNAKNTVYLQMNSLKPEDTAVYYCAAALWGHSGDWGQGTQVTVSS

SEQ ID NO: 184 - protein, 119 aa, synthetic construct
  REGION 1..119: note = Description of Artificial Sequence: Synthetic polypeptide
EVQLVESGGGLVQAGGSLRLSCAASGSTFDTYGMGWFRQAPGKEREFVASITWSGSSTYYADSVKGRFTISADNAKNTVYLQMNSLKPEDTAVYYCAANRIHWSGFYYWGQGTQVTVSS

SEQ ID NO: 185 - protein, 120 aa, synthetic construct
  REGION 1..120: note = Description of Artificial Sequence: Synthetic polypeptide
EVQLVESGGGLVQAGGSLRLSCAASGRTSSPYTMGWFRQAPGKEREFVSAISWSGGSTVYADSVKGRFTISADNAKNTVYLQMNSLKPEDTAVYYCALIRRAPYSRLETWGQGTQVTVSS

SEQ ID NO: 186 - protein, 120 aa, synthetic construct
  REGION 1..120: note = Description of Artificial Sequence: Synthetic polypeptide
EVQLVESGGGLVQAGGSLRLSCAASGSIFPINAMGWFRQAPGKEREGVAAITNFGTTKYADSVKGRFTISADNAKNTVYLQMNSLKPEDTAVYYCAAVRWGPRNDDHYDWGQGTQVTVSS

SEQ ID NO: 187 - protein, 119 aa, synthetic construct
  REGION 1..119: note = Description of Artificial Sequence: Synthetic polypeptide
EVQLVESGGGLVQAGGSLRLSCAASGRTFDTYAMGWFRQAPGKEREFVAAITWGGGRTYYADSVKGRFTISADNAKNTVYLQMNSLKPEDTAVYYCAAVPRLYRDYDYWGQGTQVTVSS

SEQ ID NO: 188 - protein, 116 aa, synthetic construct
  REGION 1..116: note = Description of Artificial Sequence: Synthetic polypeptide
EVQLVESGGGLVQAGGSLRLSCAASGRRFSAYGMGWFRQAPGKEREFVAAVSWDGRNTYYADSVKGRFTISADNAKNTVYLQMNSLKPEDTAVYYCASTDDYGVDWGQGTQVTVSS

SEQ ID NO: 189 - protein, 119 aa, synthetic construct
  REGION 1..119: note = Description of Artificial Sequence: Synthetic polypeptide
EVQLVESGGGLVQAGGSLRLSCAASGSTFDNYAMGWFRQAPGKEREFVSAISGDGGTTYYADSVKGRFTISADNAKNTVYLQMNSLKPEDTAVYYCAAVPRLYRNRDYWGQGTQVTVSS

SEQ ID NO: 190 - protein, 117 aa, synthetic construct
  REGION 1..117: note = Description of Artificial Sequence: Synthetic polypeptide
EVQLVESGGGLVQAGGSLRLSCAASGSIFRINAMGWFRQAPGKEREGVSWITSFDASTYYADSVRGRFTISADNAKNTVYLQMNSLKPEDTAVYYCAAALDGYSGSWGQGTQVTVSS

SEQ ID NO: 191 - protein, 119 aa, synthetic construct
  REGION 1..119: note = Description of Artificial Sequence: Synthetic polypeptide
EVQLVESGGGLVQAGGSLRLSCAASGRTFSNYAMGWFRQAPGKEREFVSTISTGGSSTYYADSVKGRFTISADNAKNTVYLQMNSLKPEDTAVYYCAAVPTGRGRRDYWGQGTQVTVSS

SEQ ID NO: 192 - protein, 119 aa, synthetic construct
  REGION 1..119: note = Description of Artificial Sequence: Synthetic polypeptide
EVQLVESGGGLVQAGGSLRLSCAASGRTFSSYAMGWFRQAPGKEREFVAAISWSGGSTYYADSVKGRFTISADNAKNTVYLQMNSLKPEDTAVYYCAAVPVVPNTKDYWGQGTQVTVSS

SEQ ID NO: 193 - protein, 121 aa, synthetic construct
  REGION 1..121: note = Description of Artificial Sequence: Synthetic polypeptide
EVQLVESGGGLVQAGGSLRLSCAASGNVFMIKDMGWFRQAPGKEREWVTAISWNGGSTDYADSVKGRFTISADNAKNTVYLQMNSLKPEDTAVYYCAAIVTYSDYDLGNDWGQGTQVTVSS

SEQ ID NO: 194 - protein, 119 aa, synthetic construct
  REGION 1..119: note = Description of Artificial Sequence: Synthetic polypeptide
EVQLVESGGGLVQAGGSLRLSCAASGFPFSIWPMGWFRQAPGKEREFIATIFSGGDTDYADSVKGRFTISADNAKNTVYLQMNSLKPEDTAVYYCAAIAYEEGVYRWDWGQGTQVTVSS

SEQ ID NO: 195 - protein, 118 aa, synthetic construct
  REGION 1..118: note = Description of Artificial Sequence: Synthetic polypeptide
EVQLVESGGGLVQAGGSLRLSCAASGRGFSRYAMGWFRQAPGKEREFVAAIRWSGKETWYADSVKGRFTISADNAKNTVYLQMNSLKPEDTAVYYCALGPVRRSRLEWGQGTQVTVSS

SEQ ID NO: 196 - protein, 123 aa, synthetic construct
  REGION 1..123: note = Description of Artificial Sequence: Synthetic polypeptide
EVQLVESGGGLVQAGGSLRLSCAASGRTSDIYGMGWFRQAPGKEREFVARIYWSSGNTYYADSVKGRFTISADNAKNTVYLQMNSLKPEDTAVYYCAAAYRFSDYSRPAGYDWGQGTQVTVSS

SEQ ID NO: 197 - protein, 115 aa, synthetic construct
  REGION 1..115: note = Description of Artificial Sequence: Synthetic polypeptide
EVQLVESGGGLVQAGGSLRLSCAASGNDFSFNSMGWFRQAPGKEREFLASVSWGFGSTYYADSVKGRFTISADNAKNTVYLQMNSLKPEDTAVYYCARAYGNPTWGQGTQVTVSS

SEQ ID NO: 198 - protein, 117 aa, synthetic construct
  REGION 1..117: note = Description of Artificial Sequence: Synthetic polypeptide
EVQLVESGGGLVQAGGSLRLSCAASGRTFTDYPMGWFRQAPGKERELESFVPINGTSTYYADSDSGRFTISADNAKNTVYLQMNSLKPEDTAVYYCAAALDGYSCSWGQGTQVTVSS

SEQ ID NO: 199 - protein, 117 aa, synthetic construct
  REGION 1..117: note = Description of Artificial Sequence: Synthetic polypeptide
EVQLVESGGGLVQAGGSLRLSCAASGRTFSIYAMGWFRQAPGKEREFVATISRGGSTTYYADSVKGRFTISADNAKNTVYLQMNSLKPEDTAVYYCAAGPRSGKDYWGQGTQVTVSS

SEQ ID NO: 200 - protein, 117 aa, synthetic construct
  REGION 1..117: note = Description of Artificial Sequence: Synthetic polypeptide
EVQLVESGGGLVQAGGSLRLSCAASGFIFQLYVMGWFRQAPGKEREGVTYINNIDGSTYYAYSVRGRFTISADNAKNTVYLQMNSLKPEDTAVYYCAAVRDGYSGSWGQGTQVTVSS

SEQ ID NO: 201 - protein, 118 aa, synthetic construct
  REGION 1..118: note = Description of Artificial Sequence: Synthetic polypeptide
EVQLVESGGGLVQAGGSLRLSCAASGSTFSSYAMEWFRQAPGKERELVATISRSGGRTYYADSVKGRFTISADNAKNTVYLQMNSLKPEDTAVYYCAAANWYYRYDYWGQGTQVTVSS

SEQ ID NO: 202 - protein, 122 aa, synthetic construct
  REGION 1..122: note = Description of Artificial Sequence: Synthetic polypeptide
EVQLVESGGGLVQAGGSLRLSCAASGFPFRINAMGWFRQAPGKERELVTAISSSGSSTYYADSVKGRFTISADNAKNTVYLQMNSLKPEDTAVYYCAASGYYATYYGERDYWGQGTQVTVSS

SEQ ID NO: 203 - protein, 118 aa, synthetic construct
  REGION 1..118: note = Description of Artificial Sequence: Synthetic polypeptide
EVQLVESGGGLVQAGGSLRLSCAASGFTLSSYTMGWFRQAPGKEREFVSAISRGGGNTYYADSVKGRFTISADNAKNTVYLQMNSLKPEDTAVYYCAAVPSYAEYDYWGQGTQVTVSS

SEQ ID NO: 204 - protein, 120 aa, synthetic construct
  REGION 1..120: note = Description of Artificial Sequence: Synthetic polypeptide
EVQLVESGGGLVQAGGSLRLSCAASGRTFSIYGMGWFRQAPGKEREGVAAINGGGDSTNYADSVKGRFTISADNAKNTVYLQMNSLKPEDTAVYYCAAASASPYSGRNYWGQGTQVTVSS

SEQ ID NO: 205 - protein, 117 aa, synthetic construct
  REGION 1..117: note = Description of Artificial Sequence: Synthetic polypeptide
EVQLVESGGGLVQAGGSLRLSCAASGLTFSTTVMGWFRQAPGKEREGDGYISITDGSTYYADSVKGRFTISADNAKNTVYLQMNSLKPEDTAVYYCSAALDGYSGSWGQGTQVTVSS

SEQ ID NO: 206 - protein, 120 aa, synthetic construct
  REGION 1..120: note = Description of Artificial Sequence: Synthetic polypeptide
EVQLVESGGGLVQAGGSLRLSCAASGRTLENYRMGWFRQAPGKEREFVAAVSWSSGNAYYADSVKGRFTISADNAKNTVYLQMNSLKPEDTAVYYCAANWKMLLGVENDWGQGTQVTVSS

SEQ ID NO: 207 - protein, 119 aa, synthetic construct
  REGION 1..119: note = Description of Artificial Sequence: Synthetic polypeptide
EVQLVESGGGLVQAGGSLRLSCAASGRTFSSYAMGWFRQAPGKEREFVAAISWSGGSTYYADSVKGRFTISADNAKNTVYLQMNSLKPEDTAVYYCAAVPTVYGERDYWGQGTQVTVSS

SEQ ID NO: 208 - protein, 119 aa, synthetic construct
  REGION 1..119: note = Description of Artificial Sequence: Synthetic polypeptide
EVQLVESGGGLVQAGGSLRLSCAASGSILSISPMGWFRQAPGKERELVAINFSWGTTDYADSVKGRFTISADNAKNTVYLQMNSLKPEDTAVYYCAAIAYEQGVYRWDWGQGTQVTVSS

SEQ ID NO: 209 - protein, 122 aa, synthetic construct
  REGION 1..122: note = Description of Artificial Sequence: Synthetic polypeptide
EVQLVESGGGLVQAGGSLRLSCAASGRTFSSYAMGWFRQAPGKEREFVAAISWSGGSTYYADSVKGRFTISADNAKNTVYLQMNSLKPEDTAVYYCAAERYRYSGYYARDSWGQGTQVTVSS

SEQ ID NO: 210 - protein, 119 aa, synthetic construct
  REGION 1..119: note = Description of Artificial Sequence: Synthetic polypeptide
EVQLVESGGGLVQAGGSLRLSCAASGFTLSDYAMGWFRQAPGKEREFVSAISRDGTTTYYADSVKGRFTISADNAKNTVYLQMNSLKPEDTAVYYCAAVPTSQYATDYWGQGTQVTVSS

SEQ ID NO: 211 - protein, 119 aa, synthetic construct
  REGION 1..119: note = Description of Artificial Sequence: Synthetic polypeptide
EVQLVESGGGLVQAGGSLRLSCAASGRDLDYYVMGWFRQAPGKERELVAIKFSGGTTDYADSVKGRFTISADNAKNTVYLQMNSLKPEDTAVYYCADIAYEEGVYRWDWGQGTQVTVSS

SEQ ID NO: 212 - protein, 117 aa, synthetic construct
  REGION 1..117: note = Description of Artificial Sequence: Synthetic polypeptide
EVQLVESGGGLVQAGGSLRLSCAASGSIFTFNAMGWFRQAPGKEREFVAGITRSAVSTSYADSVKGRFTISADNAKNTVYLQMNSLKPEDTAVYYCAAFRGIMRPDWGQGTQVTVSS

SEQ ID NO: 213 - protein, 119 aa, synthetic construct
  REGION 1..119: note = Description of Artificial Sequence: Synthetic polypeptide
EVQLVESGGGLVQAGGSLRLSCAASGRTFDSYAMGWFRQAPGKEREFVAAITSSGGNTYYADSVKGRFTISADNAKNTVYLQMNSLKPEDTAVYYCAAVPARYGARDYWGQGTQVTVSS

SEQ ID NO: 214 - protein, 114 aa, synthetic construct
  REGION 1..114: note = Description of Artificial Sequence: Synthetic polypeptide
EVQLVESGGGLVQAGGSLRLSCAASGRTFNNDHMGWFRQAPGKEREFVAVIEIGGATNYADSVKGRFTISADNAKNTVYLQMNSLKPEDTAVYYCATWDGRQVWGQGTQVTVSS

SEQ ID NO: 215 - protein, 117 aa, synthetic construct
  REGION 1..117: note = Description of Artificial Sequence: Synthetic polypeptide
EVQLVESGGGLVQAGGSLRLSCAASGGTFRKLAMGWFRQAPGKERELVAAIRWSGGITWYADSVKGRFTISADNAKNTVYLQMNSLKPEDTAVYYCAATLAKGGGRWGQGTQVTVSS

SEQ ID NO: 216 - protein, 119 aa, synthetic construct
  REGION 1..119: note = Description of Artificial Sequence: Synthetic polypeptide
EVQLVESGGGLVQAGGSLRLSCAASGRTFSSYAMGWFRQAPGKEREFVAAISWSGGSTYYADSVKGRFTISADNAKNTVYLQMNSLKPEDTAVYYCAAVPRAPSDRDYWGQGTQVTVSS

SEQ ID NO: 217 - protein, 122 aa, synthetic construct
  REGION 1..122: note = Description of Artificial Sequence: Synthetic polypeptide
EVQLVESGGGLVQAGGSLRLSCAASGRTFRIYAMGWFRQAPGKERELVSSISWNSGSTYYADSVKGRFTISADNAKNTVYLQMNSLKPEDTAVYYCAAAAYSYTQGTTYESWGQGTQVTVSS

SEQ ID NO: 218 - protein, 116 aa, synthetic construct
  REGION 1..116: note = Description of Artificial Sequence: Synthetic polypeptide
EVQLVESGGGLVQAGGSLRLSCAASGRTFTSYRMGWFRQAPGKEREWMGTIDYSGRTYYADSVKGRFTISADNAKNTVYLQMNSLKPEDTAVYYCAAAMDGYSGSWGQGTQVTVSS

SEQ ID NO: 219 - protein, 118 aa, synthetic construct
  REGION 1..118: note = Description of Artificial Sequence: Synthetic polypeptide
EVQLVESGGGLVQAGGSLRLSCAASGRTFSIYAMGWFRQAPGKEREFVAAINWNGDTTYYADSVKGRFTISADNAKNTVYLQMNSLKPEDTAVYYCAAVPRYSDYDYWGQGTQVTVSS

SEQ ID NO: 220 - protein, 119 aa, synthetic construct
  REGION 1..119: note = Description of Artificial Sequence: Synthetic polypeptide
EVQLVESGGGLVQAGGSLRLSCAASGRFFSTRVMGWFRQAPGKERELVAIKFSGGTTDYADSVKGRFTISADNAKNTVYLQMNSLKPEDTAVYYCAAIAHEEGVYRWDWGQGTQVTVSS

SEQ ID NO: 221 - protein, 119 aa, synthetic construct
  REGION 1..119: note = Description of Artificial Sequence: Synthetic polypeptide
EVQLVESGGGLVQAGGSLRLSCAASGRTFSSYAMGWFRQAPGKEREFVAAISWSGGSTYYADSVKGRFTISADNAKNTVYLQMNSLKPEDTAVYYCAAVPSVYGTRDYWGQGTQVTVSS

SEQ ID NO: 222 - protein, 117 aa, synthetic construct
  REGION 1..117: note = Description of Artificial Sequence: Synthetic polypeptide
EVQLVESGGGLVQAGGSLRLSCAASGSTFSIDVMGWFRQAPGKEREGVSYISMSDGRTYYADSVKGRFTISADNAKNTVYLQMNSLKPEDTAVYYCAAELDGYSGSWGQGTQVTVSS

SEQ ID NO: 223 - protein, 121 aa, synthetic construct
  REGION 1..121: note = Description of Artificial Sequence: Synthetic polypeptide
EVQLVESGGGLVQAGGSLRLSCAASGLSFSGYTMGWFRQAPGKEREVVAAISRTGGSTYYADSVKGRFTISADNAKNTVYLQMNSLKPEDTAVYYCALIQRRAPYSRLETWGQGTQVTVSS

SEQ ID NO: 224 - protein, 121 aa, synthetic construct
  REGION 1..121: note = Description of Artificial Sequence: Synthetic polypeptide
EVQLVESGGGLVQAGGSLRLSCAASGSTLSIYGMGWFRQAPGKEREGVAAISWSDGSTSYADSVKGRFTISADNAKNTVYLQMNSLKPEDTAVYYCAAVADIGLASDFDYWGQGTQVTVSS

SEQ ID NO: 225 - protein, 119 aa, synthetic construct
  REGION 1..119: note = Description of Artificial Sequence: Synthetic polypeptide
EVQLVESGGGLVQAGGSLRLSCAASGSTFSNYAMGWFRQAPGKEREFVATITRSSGNTYYADSVKGRFTISADNAKNTVYLQMNSLKPEDTAVYYCAAVPFKPYSYDYWGQGTQVTVSS

SEQ ID NO: 226 - protein, 119 aa, synthetic construct
  REGION 1..119: note = Description of Artificial Sequence: Synthetic polypeptide
EVQLVESGGGLVQAGGSLRLSCAASGSTFSIYTMGWFRQAPGKEREFVAAISGSSDSTYYADSVKGRFTISADNAKNTVYLQMNSLKPEDTAVYYCATVPKTRYTRDYWGQGTQVTVSS

SEQ ID NO: 227 - protein, 117 aa, synthetic construct
  REGION 1..117: note = Description of Artificial Sequence: Synthetic polypeptide
EVQLVESGGGLVQAGGSLRLSCAASGNTFSSYAMGWFRQAPGKEREFVAIISRSGGRTYYADSVKGRFTISADNAKNTVYLQMNSLKPEDTAVYYCAAAPYNETNSWGQGTQVTVSS

SEQ ID NO: 228 - protein, 117 aa, synthetic construct
  REGION 1..117: note = Description of Artificial Sequence: Synthetic polypeptide
EVQLVESGGGLVQAGGSLRLSCAASGSTFSTYAMGWFRQAPGKEREFVASISRSGGRTYYADSVKGRFTISADNAKNTVYLQMNSLKPEDTAVYYCAAARYNERNSWGQGTQVTVSS

SEQ ID NO: 229 - protein, 119 aa, synthetic construct
  REGION 1..119: note = Description of Artificial Sequence: Synthetic polypeptide
EVQLVESGGGLVQAGGSLRLSCAASGGTLNNNPMAMGWFRQAPGKEREFVVAIYWSNGKTPYADSVKRRFTISADNAKNTVYLQMNSLKPEDTAVYYCAAALDGYSGAWGQGTQVTVSS

SEQ ID NO: 230 - protein, 119 aa, synthetic construct
  REGION 1..119: note = Description of Artificial Sequence: Synthetic polypeptide
EVQLVESGGGLVQAGGSLRLSCAASGRTFSSYAMGWFRQAPGKEREFVAAISWSGGSTYYADSVKGRFTISADNAKNTVYLQMNSLKPEDTAVYYCAAVPRAPSERDYWGQGTQVTVSS

SEQ ID NO: 231 - protein, 114 aa, synthetic construct
  REGION 1..114: note = Description of Artificial Sequence: Synthetic polypeptide
EVQLVESGGGLVQAGGSLRLSCAASGRTFNNNDMGWFRQAPGKEREFVAVIKLGGATTYDDYSEGRFTISADNAKNTVYLQMNSLKPEDTAVYYCATWDARHVWGQGTQVTVSS

SEQ ID NO: 232 - protein, 117 aa, synthetic construct
  REGION 1..117: note = Description of Artificial Sequence: Synthetic polypeptide
EVQLVESGGGLVQAGGSLRLSCAASGRAFSYYNMGWFRQAPGKEREGVSWISSSDGSTYYADSVKGRFTISADNAKNTVYLQMNSLKPEDTAVYYCAAVLDGCSGSWGQGTQVTVSS

SEQ ID NO: 233 - protein, 122 aa, synthetic construct
  REGION 1..122: note = Description of Artificial Sequence: Synthetic polypeptide
EVQLVESGGGLVQAGGSLRLSCAASGSTFSTYAMGWFRQAPGKEREFVAAINRSGASTYYADSVKGRFTISADNAKNTVYLQMNSLKPEDTAVYYCAAALLGGRGGCGKGYWGQGTQVTVSS

SEQ ID NO: 234 - protein, 116 aa, synthetic construct
  REGION 1..116: note = Description of Artificial Sequence: Synthetic polypeptide
EVQLVESGGGLVQAGGSLRLSCAASGSILDTYAMGWFRQAPGKERELVSGINTSGDTTYYADSVKGRFTISADNAKNTVYLQMNSLKPEDTAVYYCAAVLAGYEYWGQGTQVTVSS

SEQ ID NO: 235 - protein, 113 aa, synthetic construct
  REGION 1..113: note = Description of Artificial Sequence: Synthetic polypeptide
EVQLVESGGGLVQAGGSLRLSCAASGSTLSINAMGWFRQAPGKEREFVAHMSHDGTTNYADSVKGRFTISADNAKNTVYLQMNSLKPEDTAVYYCARLPNYRWGQGTQVTVSS

SEQ ID NO: 236 - protein, 118 aa, synthetic construct
  REGION 1..118: note = Description of Artificial Sequence: Synthetic polypeptide
EVQLVESGGGLVQAGGSLRLSCAASGSIFRLNAMGWFRQAPGKEREGVAAINNFDTTKYADSSKGRFTISADNAKNTVYLQMNSLKPEDTAVYYCAAVRWGPRSDDRWGQGTQVTVSS

SEQ ID NO: 237 - protein, 127 aa, synthetic construct
  REGION 1..127: note = Description of Artificial Sequence: Synthetic polypeptide
EVQLVESGGGLVQAGGSLRLSCAASGLTNPPFDNFPMGWFRQAPGKEREFVAVISWTGGSTYYADSVKGRFTISADNAKNTVYLQMNSLKPEDTAVYYCPAVYPRYYGDDDRPPVDWGQGTQVTVSS

SEQ ID NO: 238 - protein, 117 aa, synthetic construct
  REGION 1..117: note = Description of Artificial Sequence: Synthetic polypeptide
EVQLVESGGGLVQAGGSLRLSCAASGPTFSKAVMGWFRQAPGKEREFVAAMNWSGRSTYYADSVKGRFTISADNAKNTVYLQMNSLKPEDTAVYYCAATPAGRGGYWGQGTQVTVSS

SEQ ID NO: 239 - protein, 119 aa, synthetic construct
  REGION 1..119: note = Description of Artificial Sequence: Synthetic polypeptide
EVQLVESGGGLVQAGGSLRLSCAASGSIFSDYAMGWFRQAPGKEREFVATINWGGGRTYYADSVKGRFTISADNAKNTVYLQMNSLKPEDTAVYYCAAVPKTRYARDYWGQGTQVTVSS

SEQ ID NO: 240 - protein, 118 aa, synthetic construct
  REGION 1..118: note = Description of Artificial Sequence: Synthetic polypeptide
EVQLVESGGGLVQAGGSLRLSCAASGFILSDYAMGWFRQAPGKEREFVAAISSSEASTYYADSVKGRFTISADNAKNTVYLQMNSLKPEDTAVYYCAAVRFWAGYDSWGQGTQVTVSS

SEQ ID NO: 241 - protein, 123 aa, synthetic construct
  REGION 1..123: note = Description of Artificial Sequence: Synthetic polypeptide
EVQLVESGGGLVQAGGSLRLSCAASGYTDYKYDMGWFRQAPGKEREFVAAISWGGGLTVYADSVKGRFTISADNAKNTVYLQMNSLKPEDTAVYYCAAVATVTDYTGTYSDGWGQGTQVTVSS

SEQ ID NO: 242 - protein, 119 aa, synthetic construct
  REGION 1..119: note = Description of Artificial Sequence: Synthetic polypeptide
EVQLVESGGGLVQAGGSLRLSCAASGRTFSNYAMGWFRQAPGKEREFVATINWGGGNTYYADSVKGRFTISADNAKNTVYLQMNSLKPEDTAVYYCAAVPKTRYAYDYWGQGTQVTVSS

SEQ ID NO: 243 - protein, 122 aa, synthetic construct
  REGION 1..122: note = Description of Artificial Sequence: Synthetic polypeptide
EVQLVESGGGLVQAGGSLRLSCAASGRTFSRYYMGWFRQAPGKERELVAVILRGGSTNYADSVKGRFTISADNAKNTVYLQMNSLKPEDTAVYYCAAARRYGNLYNTNNYDWGQGTQVTVSS

SEQ ID NO: 244 - protein, 119 aa, synthetic construct
  REGION 1..119: note = Description of Artificial Sequence: Synthetic polypeptide
EVQLVESGGGLVQAGGSLRLSCAASGSILSSYVMGWFRQAPGKEREFVSAISRSGTSTYYADSVKGRFTISADNAKNTVYLQMNSLKPEDTAVYYCAAVPKTRYDRDYWGQGTQVTVSS

SEQ ID NO: 245 - protein, 119 aa, synthetic construct
  REGION 1..119: note = Description of Artificial Sequence: Synthetic polypeptide
EVQLVESGGGLVQAGGSLRLSCAASGFTLDNYAMGWFRQAPGKEREFVAAISWSGGSTYYADSVKGRFTISADNAKNTVYLQMNSLKPEDTAVYYCAAVPKTRYSYDYWGQGTQVTVSS

SEQ ID NO: 246 - protein, 122 aa, synthetic construct
  REGION 1..122: note = Description of Artificial Sequence: Synthetic polypeptide
EVQLVESGGGLVQAGGSLRLSCAASGNTYSYKVMGWFRQAPGKEREFVGIIIRNGDTTYYADSVKGRFTISADNAKNTVYLQMNSLKPEDTAVYYCAASPKYMTAYERSYDWGQGTQVTVSS

SEQ ID NO: 247 - protein, 119 aa, synthetic construct
  REGION 1..119: note = Description of Artificial Sequence: Synthetic polypeptide
EVQLVESGGGLVQAGGSLRLSCAASGSIFRNYAMGWFRQAPGKEREFVATITTSGGNTYYADSVKGRFTISADNAKNTVYLQMNSLKPEDTAVYYCAAVPKTRYRRDYWGQGTQVTVSS

SEQ ID NO: 248 - protein, 123 aa, synthetic construct
  REGION 1..123: note = Description of Artificial Sequence: Synthetic polypeptide
EVQLVESGGGLVQAGGSLRLSCAASGFTFGTTTMGWFRQAPGKEREVVAAITGSGRSTYYADSVKGRFTISADNAKNTVYLQMNSLKPEDTAVYYCAASAIGSGALRRFEYDWGQGTQVTVSS

SEQ ID NO: 249 - protein, 125 aa, synthetic construct
  REGION 1..125: note = Description of Artificial Sequence: Synthetic polypeptide
EVQLVESGGGLVQAGGSLRLSCAASGGTFSAYAMGWFRQAPGKEREGVAAIRWDGGYTRYADSVKGRFTISADNAKNTVYLQMNSLKPEDTAVYYCAATTPTTSYLPRSERQYEWGQGTQVTVSS

SEQ ID NO: 250 - protein, 119 aa, synthetic construct
  REGION 1..119: note = Description of Artificial Sequence: Synthetic polypeptide
EVQLVESGGGLVQAGGSLRLSCAASGRTFSSYAMGWFRQAPGKEREFVAAISWSGGSTYYADSVKGRFTISADNAKNTVYLQMNSLKPEDTAVYYCAAVPSVYGERDYWGQGTQVTVSS

SEQ ID NO: 251 - protein, 123 aa, synthetic construct
  REGION 1..123: note = Description of Artificial Sequence: Synthetic polypeptide
EVQLVESGGGLVQAGGSLRLSCAASGSFFSINAMGWFRQAPGKEREFVAGISQSGGSTAYADSVKGRFTISADNAKNTVYLQMNSLKPEDTAVYYCAAHRIVVGGTSVGDWRWGQGTQVTVSS

SEQ ID NO: 252 - protein, 113 aa, synthetic construct
  REGION 1..113: note = Description of Artificial Sequence: Synthetic polypeptide
EVQLVESGGGLVQAGGSLRLSCAASGRTFSSYRMGWFRQAPGKEREMVASITSRKIPKYADSVKGRFTISADNAKNTVYLQMNSLKPEDTAVYYCAVWSGRDWGQGTQVTVSS

SEQ ID NO: 253 - protein, 123 aa, synthetic construct
  REGION 1..123: note = Description of Artificial Sequence: Synthetic polypeptide
EVQLVESGGGLVQAGGSLRLSCAASGFTFRRYVMGWFRQAPGKEREFVAAISRDGDRTYYADSVKGRFTISADNAKNTVYLQMNSLKPEDTAVYYCASTRLAGRWYRDSEYKWGQGTQVTVSS

SEQ ID NO: 254 - protein, 117 aa, synthetic construct
  REGION 1..117: note = Description of Artificial Sequence: Synthetic polypeptide
EVQLVESGGGLVQAGGSLRLSCAASGRTFSDNAMGWFRQAPGKEREFVATISRGGSRTSYADSVKGRFTISADNAKNTVYLQMNSLKPEDTAVYYCAAGPRSGRDYWGQGTQVTVSS

SEQ ID NO: 255 - protein, 116 aa, synthetic construct
  REGION 1..116: note = Description of Artificial Sequence: Synthetic polypeptide
EVQLVESGGGLVQAGGSLRLSCAASGFTFRSYAMGWFRQAPGKEREFVATITRNGDNTYYADSVKGRFTISADNAKNTVYLQMNSLKPEDTAVYYCATVGTRYNYWGQGTQVTVSS

SEQ ID NO: 256 - protein, 117 aa, synthetic construct
  REGION 1..117: note = Description of Artificial Sequence: Synthetic polypeptide
EVQLVESGGGLVQAGGSLRLSCAASGSTFSDYVMGWFRQAPGKERELISGITWNGDTTYYADSVKGRFTISADNAKNTVYLQMNSLKPEDTAVYYCAVVRLGGYDYWGQGTQVTVSS

SEQ ID NO: 257 - protein, 114 aa, synthetic construct
  REGION 1..114: note = Description of Artificial Sequence: Synthetic polypeptide
EVQLVESGGGLVQAGGSLRLSCAASGGIISNYHMGWFRQAPGKEREFVATITRSGGSTYYADSVKGRFTISADNAKNTVYLQMNSLKPEDTAVYYCAMAGRGRWGQGTQVTVSS

SEQ ID NO: 258 - protein, 127 aa, synthetic construct
  REGION 1..127: note = Description of Artificial Sequence: Synthetic polypeptide
EVQLVESGGGLVQAGGSLRLSCAASGFSFDDDYVMGWFRQAPGKERELVSAIGWSGASTYYADSVKGRFTISADNAKNTVYLQMNSLKPEDTAVYYCAAYYTDYDEALEETRGSYDWGQGTQVTVSS

SEQ ID NO: 259 - protein, 123 aa, synthetic construct
  REGION 1..123: note = Description of Artificial Sequence: Synthetic polypeptide
EVQLVESGGGLVQAGGSLRLSCAASGSTFPIYAMGWFRQAPGKEREWVSGISSRDDTTYYADSVKGRFTISADNAKNTVYLQMNSLKPEDTAVYYCSAHRIVFRGTSVGDWRWGQGTQVTVSS

SEQ ID NO: 260 - protein, 117 aa, synthetic construct
  REGION 1..117: note = Description of Artificial Sequence: Synthetic polypeptide
EVQLVESGGGLVQAGGSLRLSCAASGRAFSYYNMGWFRQAPGKEREGVSWISSSDGSTYYADSVKGRFTISADNAKNTVYLQMNSLKPEDTAVYYCAAVLDGYSGSWGQGTQVTVSS

SEQ ID NO: 261 - protein, 122 aa, synthetic construct
  REGION 1..122: note = Description of Artificial Sequence: Synthetic polypeptide
EVQLVESGGGLVQAGGSLRLSCAASGSTFSIDVMGWFRQAPGKERELVAATGRRGGPTYYADSVKGRFTISADNAKNTVYLQMNSLKPEDTAVYYCAARTSYSGTYDYGVDWGQGTQVTVSS

SEQ ID NO: 262 - protein, 116 aa, synthetic construct
  REGION 1..116: note = Description of Artificial Sequence: Synthetic polypeptide
EVQLVESGGGLVQAGGSLRLSCAASGGTFSSYAMGWFRQAPGKEREFVAAINWSGSITYYADSVKGRFTISADNAKNTVYLQMNSLKPEDTAVYYCAVGRSGRDYWGQGTQVTVSS

SEQ ID NO: 263 - protein, 120 aa, synthetic construct
  REGION 1..120: note = Description of Artificial Sequence: Synthetic polypeptide
EVQLVESGGGLVQAGGSLRLSCAASGSIFRINAMGWFRQAPGKEREGVAAINNFGTTKYADSVKGRFTISADNAKNTVYLQMNSLKPEDTAVYYCAAVRWGPRNDDRYDWGQGTQVTVSS

SEQ ID NO: 264 - protein, 119 aa, synthetic construct
  REGION 1..119: note = Description of Artificial Sequence: Synthetic polypeptide
EVQLVESGGGLVQAGGSLRLSCAASGGTLNNNPMAMGWFRQAPGKEREFVVAIYWSNGKTQYADSVKGRFTISADNAKNTVYLQMNSLKPEDTAVYYCAAALDGYSGSWGQGTQVTVSS

SEQ ID NO: 265 - protein, 114 aa, synthetic construct
  REGION 1..114: note = Description of Artificial Sequence: Synthetic polypeptide
EVQLVESGGGLVQAGGSLRLSCAASGRTFNNDHMGWFRQAPGKEREFVAVIEIGGATNYADSVKGRFTISADNAKNTVYLQMNSLKPEDTAVYYCASWDGRQVWGQGTQVTVSS

SEQ ID NO: 266 - protein, 119 aa, synthetic construct
  REGION 1..119: note = Description of Artificial Sequence: Synthetic polypeptide
EVQLVESGGGLVQPGGSLRLSCAASGRTFAMGWMGWFRQAPGKEREFVARVSWDGRNAYYANSRFGRFTISADNSKNTAYLQMNSLKPEDTAVYYCPRYVSPARDHGCWGQGTLVTVSS

SEQ ID NO: 267 - protein, 126 aa, synthetic construct
  REGION 1..126: note = Description of Artificial Sequence: Synthetic polypeptide
EVQLVESGGGLVQPGGSLRLSCAASGLTISTYIMGWFRQAPGKEREFVAVVNWNGDSTYYADSVKGRFTISADNSKNTAYLQMNSLKPEDTAVYYCAAYYTDYDEALEETRGSYDWGQGTLVTVSS

SEQ ID NO: 268 - protein, 121 aa, synthetic construct
  REGION 1..121: note = Description of Artificial Sequence: Synthetic polypeptide
EVQLVESGGGLVQPGGSLRLSCAASGTLFKINAMGWFRQAPGKERELVAAINRGGKITHYADSVKGRFTISADNSKNTAYLQMNSLKPEDTAVYYCAASLRNSGSNVEGRWGQGTLVTVSS

SEQ ID NO: 269 - protein, 125 aa, synthetic construct
  REGION 1..125: note = Description of Artificial Sequence: Synthetic polypeptide
EVQLVESGGGLVQPGGSLRLSCAASGVTLDLYAMGWFRQAPGKEREFVAAISPSAVTTYYADSVKGRFTISADNSKNTAYLQMNSLKPEDTAVYYCAAYDYYSDYPLPDANEYEWGQGTLVTVSS

SEQ ID NO: 270 - protein, 127 aa, synthetic construct
  REGION 1..127: note = Description of Artificial Sequence: Synthetic polypeptide
EVQLVESGGGLVQPGGSLRLSCAASGRTFSDYIMGWFRQAPGKEREFVAVINRSGSTTYYADSVKGRFTISADNSKNTAYLQMNSLKPEDTAVYYCAAVQAYSNSSDYYSQEGAYDWGQGTLVTVSS

SEQ ID NO: 271 - protein, 117 aa, synthetic construct
  REGION 1..117: note = Description of Artificial Sequence: Synthetic polypeptide
EVQLVESGGGLVQPGGSLRLSCAASGFTFSNYVMGWFRQAPGKEREGVSYISSSDGRTHYADSVKGRFTISADNSKNTAYLQMNSLKPEDTAVYYCAAVLDGYNGSWGQGTLVTVSS

SEQ ID NO: 272 - protein, 123 aa, synthetic construct
  REGION 1..123: note = Description of Artificial Sequence: Synthetic polypeptide
EVQLVESGGGLVQPGGSLRLSCAASGFTFSRFGMGWFRQAPGKEREGVAAIGSDGSTSYADSVKGRFTISADNSKNTAYLQMNSLKPEDTAVYYCASGRDRYARDLSEYEYVWGQGTLVTVSS

SEQ ID NO: 273 - protein, 120 aa, synthetic construct
  REGION 1..120: note = Description of Artificial Sequence: Synthetic polypeptide
EVQLVESGGGLVQPGGSLRLSCAASGFTFRFNAMGWFRQAPGKEREFVAAINWRGSHPYYADSVKGRFTISADNSKNTAYLQMNSLKPEDTAVYYCAAATLGEPLVKYTWGQGTLVTVSS

SEQ ID NO: 274 - protein, 126 aa, synthetic construct
  REGION 1..126: note = Description of Artificial Sequence: Synthetic polypeptide
EVQLVESGGGLVQPGGSLRLSCAASGGTFGVYHMGWFRQAPGKEREFLASVTWGFGSTYYADSVKGRFTISADNSKNTAYLQMNSLKPEDTAVYYCAATTTRSYDDTYRNSWVYNWGQGTLVTVSS

SEQ ID NO: 275 - protein, 120 aa, synthetic construct
  REGION 1..120: note = Description of Artificial Sequence: Synthetic polypeptide
EVQLVESGGGLVQPGGSLRLSCAASGFSFDDYAMGWFRQAPGKERELVAAIRWSGGITWYADSVKGRFTISADNSKNTAYLQMNSLKPEDTAVYYCAAYGSGSDYLPMDWGQGTLVTVSS

SEQ ID NO: 276 - protein, 127 aa, synthetic construct
  REGION 1..127: note = Description of Artificial Sequence: Synthetic polypeptide
EVQLVESGGGLVQPGGSLRLSCAASGPTFTIYAMGWFRQAPGKEREFVGAISMSGEDTIYADSEKGRFTISADNSKNTAYLQMNSLKPEDTAVYYCAAVQAYTSNTNYYNQEGAYDWGQGTLVTVSS

SEQ ID NO: 277 - protein, 117 aa, synthetic construct
  REGION 1..117: note = Description of Artificial Sequence: Synthetic polypeptide
EVQLVESGGGLVQPGGSLRLSCAASGPTFSNYYVGWFRQAPGKEREFVAAILCSGGITCYADSVKGRFTISADNSKNTAYLQMNSLKPEDTAVYYCAAALDGYIGTWGQGTLVTVSS

SEQ ID NO: 278 - protein, 123 aa, synthetic construct
  REGION 1..123: note = Description of Artificial Sequence: Synthetic polypeptide
EVQLVESGGGLVQPGGSLRLSCAASGGTFSSIGMGWFRQAPGKEREGVAAIGSDGSTSYADSVKGRFTISADNSKNTAYLQMNSLKPEDTAVYYCAAASDRYARVLTEYEYVWGQGTLVTVSS

SEQ ID NO: 279 - protein, 116 aa, synthetic construct
  REGION 1..116: note = Description of Artificial Sequence: Synthetic polypeptide
EVQLVESGGGLVQPGGSLRLSCAASGVTFNNYGMGWFRQAPGKERELVAAIRWSGSATFYADSVKGRFTISADNSKNTAYLQMNSLKPEDTAVYYCAADDGARGSWGQGTLVTVSS

SEQ ID NO: 280 - protein, 120 aa, synthetic construct
  REGION 1..120: note = Description of Artificial Sequence: Synthetic polypeptide
EVQLVESGGGLVQPGGSLRLSCAASGRTFTMDGMGWFRQAPGKEREGVAAIGSDGSTSYADSVKGRFTISADNSKNTAYLQMNSLKPEDTAVYYCAAGSNIGGSRWRYDWGQGTLVTVSS

SEQ ID NO: 281 - protein, 126 aa, synthetic construct
  REGION 1..126: note = Description of Artificial Sequence: Synthetic polypeptide
EVQLVESGGGLVQPGGSLRLSCAASGGIFRFNAMGWFRQAPGKERELVAAISPAALTTYYADSVKGRFTISADNSKNTAYLQMNSLKPEDTAVYYCAAYLPSPYYSSYYDSTKYEWGQGTLVTVSS

SEQ ID NO: 282 - protein, 123 aa, synthetic construct
  REGION 1..123: note = Description of Artificial Sequence: Synthetic polypeptide
EVQLVESGGGLVQPGGSLRLSCAASGSGFSPNVMGWFRQAPGKEREVVAAISWNGGSTYYADSVKGRFTISADNSKNTAYLQMNSLKPEDTAVYYCAASAIGSGALRRFEYDWGQGTLVTVSS

SEQ ID NO: 283 - protein, 125 aa, synthetic construct
  REGION 1..125: note = Description of Artificial Sequence: Synthetic polypeptide
EVQLVESGGGLVQPGGSLRLSCAASGFTFGFYAMGWFRQAPGKERELVAAISWSDASTYYADSVKGRFTISADNSKNTAYLQMNSLKPEDTAVYYCALDNRRSYVDYYNVSEYDWGQGTLVTVSS

SEQ ID NO: 284 - protein, 116 aa, synthetic construct
  REGION 1..116: note = Description of Artificial Sequence: Synthetic polypeptide
EVQLVESGGGLVQPGGSLRLSCAASGFTFSIYPMGWFRQAPGKERECVSTIWSRGDTYYADNVKGRFTISADNSKNTAYLQMNSLKPEDTAVYYCAAALDGYSATWGQGTLVTVSS

SEQ ID NO: 285 - protein, 125 aa, synthetic construct
  REGION 1..125: note = Description of Artificial Sequence: Synthetic polypeptide
EVQLVESGGGLVQPGGSLRLSCAASGFTFDYYAMGWFRQAPGKERELVAAISWSNDITYYADSVKGRFTISADNSKNTAYLQMNSLKPEDTAVYYCALDNRRSYVDYYSVSEYDWGQGTLVTVSS

SEQ ID NO: 286 - protein, 117 aa, synthetic construct
  REGION 1..117: note = Description of Artificial Sequence: Synthetic polypeptide
EVQLVESGGGLVQPGGSLRLSCAASGGTFSTYTMGWFRQAPGKEREFVAGIYNDGTASYYADSVKGRFTISADNSKNTAYLQMNSLKPEDTAVYYCAAFDGYTGNDWGQGTLVTVSS

SEQ ID NO: 287 - protein, 117 aa, synthetic construct
  REGION 1..117: note = Description of Artificial Sequence: Synthetic polypeptide
EVQLVESGGGLVQPGGSLRLSCAASGVTLDLYAMGWFRQAPGKEREWVARMYLDGDYPYYADSVKGRFTISADNSKNTAYLQMNSLKPEDTAVYYCAAVLDGYSGSWGQGTLVTVSS

SEQ ID NO: 288 - protein, 123 aa, synthetic construct
  REGION 1..123: note = Description of Artificial Sequence: Synthetic polypeptide
EVQLVESGGGLVQPGGSLRLSCAASGRTISRYIMGWFRQAPGKERELVAAINRSGKSTYYADSVKGRFTISADNSKNTAYLQMNSLKPEDTAVYYCASTRFAGRWYRDSEYKWGQGTLVTVSS

SEQ ID NO: 289 - protein, 117 aa, synthetic construct
  REGION 1..117: note = Description of Artificial Sequence: Synthetic polypeptide
EVQLVESGGGLVQPGGSLRLSCAASGRTLSVYAMGWFRQAPGKEREFVAAVRWSGGITWYVDSVKGRFTISADNSKNTAYLQMNSLKPEDTAVYYCAAFDGYSGSDWGQGTLVTVSS

SEQ ID NO: 290 - protein, 130 aa, synthetic construct
  REGION 1..130: note = Description of Artificial Sequence: Synthetic polypeptide
EVQLVESGGGLVQPGGSLRLSCAASGSIFSITEMGWFRQAPGKERELVAAIAVGGGITWYADSVKGRFTISADNSKNTAYLQMNSLKPEDTAVYYCAAHDVDDDESPYYSGGYYRALYDWGQGTLVTVSS

SEQ ID NO: 291 - protein, 129 aa, synthetic construct
  REGION 1..129: note = Description of Artificial Sequence: Synthetic polypeptide
EVQLVESGGGLVQPGGSLRLSCAASGSIYSLDAMGWFRQAPGKERELVAAISPAALTTYYADSVKGRFTISADNSKNTAYLQMNSLKPEDTAVYYCAASMSLRPLDPASYSPDIQPYDWGQGTLVTVSS

SEQ ID NO: 292 - protein, 116 aa, synthetic construct
  REGION 1..116: note = Description of Artificial Sequence: Synthetic polypeptide
EVQLVESGGGLVQPGGSLRLSCAASGFTCGDYTMGWFRQAPGKERESVAAIDSDGRTHYADSVISRFTISADNSKNTAYLQMNSLKPEDTAVYYCAAALDGYSGDWGQGTLVTVSS

SEQ ID NO: 293 - protein, 124 aa, synthetic construct
  REGION 1..124: note = Description of Artificial Sequence: Synthetic polypeptide
EVQLVESGGGLVQPGGSLRLSCAASGRTLSFYAMGWFRQAPGKEREFVAAINRGGRISHYADSVKGRFTISADNSKNTAYLQMNSLKPEDTAVYYCAAGRRYGSPPHDGSSYEWGQGTLVTVSS

SEQ ID NO: 294 - protein, 114 aa, synthetic construct
  REGION 1..114: note = Description of Artificial Sequence: Synthetic polypeptide
EVQLVESGGGLVQPGGSLRLSCAASGFTFDDYAMGWFRQAPGKEREFVAGISWTGGITYYADSVKGRFTISADNSKNTAYLQMNSLKPEDTAVYYCAVNVGFEWGQGTLVTVSS

SEQ ID NO: 295 - protein, 121 aa, synthetic construct
  REGION 1..121: note = Description of Artificial Sequence: Synthetic polypeptide
EVQLVESGGGLVQPGGSLRLSCAASGFTFDDYGMGWFRQAPGKEREGVAAIGSDGSTSYADSVKGRFTISADNSKNTAYLQMNSLKPEDTAVYYCAATLRATITNFDEYVWGQGTLVTVSS

SEQ ID NO: 296 - protein, 122 aa, synthetic construct
  REGION 1..122: note = Description of Artificial Sequence: Synthetic polypeptide
EVQLVESGGGLVQPGGSLRLSCAASGRTFNRYPMGWFRQAPGKEREFVAHMSHDGTTNYADSVKGRFTISADNSKNTAYLQMNSLKPEDTAVYYCAAPGTRYYGSNQVNYNWGQGTLVTVSS

SEQ ID NO: 297 - protein, 117 aa, synthetic construct
  REGION 1..117: note = Description of Artificial Sequence: Synthetic polypeptide
EVQLVESGGGLVQPGGSLRLSCAASGSIFSFNAMGWFRQAPGKEREFVAGITRRGLSTSYADSVKGRFTISADNSKNTAYLQMNSLKPEDTAVYYCAAAKGIGVYGWGQGTLVTVSS

SEQ ID NO: 298 - protein, 125 aa, synthetic construct
  REGION 1..125: note = Description of Artificial Sequence: Synthetic polypeptide
EVQLVESGGGLVQPGGSLRLSCAASGGSISSINAMGWFRQAPGKERELVAGIITSGDSTYYADSVKGRFTISADNSKNTAYLQMNSLKPEDTAVYYCAAGSAYVAGVRRRNAYHWGQGTLVTVSS

SEQ ID NO: 299 - protein, 125 aa, synthetic construct
  REGION 1..125: note = Description of Artificial Sequence: Synthetic polypeptide
EVQLVESGGGLVQPGGSLRLSCAASGGTFSADVMGWFRQAPGKEREFVAAISTGSITIYADSVKGRFTISADNSKNTAYLQMNSLKPEDTAVYYCATYGYDSGLYFITDSNDYEWGQGTLVTVSS

SEQ ID NO: 300 - protein, 125 aa, synthetic construct
  REGION 1..125: note = Description of Artificial Sequence: Synthetic polypeptide
EVQLVESGGGLVQPGGSLRLSCAASGFTFDDAAMGWFRQAPGKEREFVAAMRWRGGITWYADSVKGRFTISADNSKNTAYLQMNSLKPEDTAVYYCAAQGTLYDDYDGLPIKYDWGQGTLVTVSS

SEQ ID NO: 301 - protein, 123 aa, synthetic construct
  REGION 1..123: note = Description of Artificial Sequence: Synthetic polypeptide
EVQLVESGGGLVQPGGSLRLSCAASGDIFNINAMGWFRQAPGKEREPVAAISPAALTTYYADSVKGRFTISADNSKNTAYLQMNSLKPEDTAVYYCAATPIERLGLDAYEYDWGQGTLVTVSS

SEQ ID NO: 302 - protein, 126 aa, synthetic construct
  REGION 1..126: note = Description of Artificial Sequence: Synthetic polypeptide
EVQLVESGGGLVQPGGSLRLSCAASGRTFSTYNMGWFRQAPGKEREFVAAINWSGGITWYADSVKGRFTISADNSKNTAYLQMNSLKPEDTAVYYCAAEPPDSSWYLDGSPEFFKWGQGTLVTVSS

SEQ ID NO: 303 - protein, 125 aa, synthetic construct
  REGION 1..125: note = Description of Artificial Sequence: Synthetic polypeptide
EVQLVESGGGLVQPGGSLRLSCAASGSISVFDAMGWFRQAPGKERELVAGISGSGGDTYYADSVKGRFTISADNSKNTAYLQMNSLKPEDTAVYYCAASPKYSTHSIFDASPYNWGQGTLVTVSS

SEQ ID NO: 304 - protein, 126 aa, synthetic construct
  REGION 1..126: note = Description of Artificial Sequence: Synthetic polypeptide
EVQLVESGGGLVQPGGSLRLSCAASGFTSDDYAMGWFRQAPGKEREFVAALRWSSSNIDYTYYADSVKGRFTISADNSKNTAYLQMNSLKPEDTAVYYCATDLSGHGDVSEYEYDWGQGTLVTVSS

SEQ ID NO: 305 - protein, 123 aa, synthetic construct
  REGION 1..123: note = Description of Artificial Sequence: Synthetic polypeptide
EVQLVESGGGLVQPGGSLRLSCAASGFTFSPNVMGWFRQAPGKEREFVAAITSSGETTWYADSVKGRFTISADNSKNTAYLQMNSLKPEDTAVYYCAAEPYGSGSSLMSEYDWGQGTLVTVSS

SEQ ID NO: 306 - protein, 120 aa, synthetic construct
  REGION 1..120: note = Description of Artificial Sequence: Synthetic polypeptide
EVQLVESGGGLVQPGGSLRLSCAASGRNLRMYRMGWFRQAPGKEREFVAAINWSGDNTHYADSVKGRFTISADNSKNTAYLQMNSLKPEDTAVYYCAANWKMLLGVENDWGQGTLVTVSS

SEQ ID NO: 307 - protein, 126 aa, synthetic construct
  REGION 1..126: note = Description of Artificial Sequence: Synthetic polypeptide
EVQLVESGGGLVQPGGSLRLSCAASGDTFNCYAMGWFRQAPGKEREFVAVINWSGDNTHYADSVKGRFTISADNSKNTAYLQMNSLKPEDTAVYYCAAYYTDYDEALEETRGRYDWGQGTLVTVSS

SEQ ID NO: 308 - protein, 123 aa, synthetic construct
  REGION 1..123: note = Description of Artificial Sequence: Synthetic polypeptide
EVQLVESGGGLVQPGGSLRLSCAASGSISTINVMGWFRQAPGKEREFVAAISPSAVTTYYADSVKGRFTISADNSKNTAYLQMNSLKPEDTAVYYCATDLSGRGDVSEYEYDWGQGTLVTVSS

SEQ ID NO: 309 - protein, 118 aa, synthetic construct
  REGION 1..118: note = Description of Artificial Sequence: Synthetic polypeptide
EVQLVESGGGLVQPGGSLRLSCAASGRTLSKYRMGWFRQAPGKEREFVAAIRWSGGITWYADSVKGRFTISADNSKNTAYLQMNSLKPEDTAVYYCAIPHGIAGRITWGQGTLVTVSS

SEQ ID NO: 310 - protein, 124 aa, synthetic construct
  REGION 1..124: note = Description of Artificial Sequence: Synthetic polypeptide
EVQLVESGGGLVQPGGSLRLSCAASGFTFGSYAMGWFRQAPGKERELVAGIDQSGGITWYADSVKGRFTISADNSKNTAYLQMNSLKPEDTAVYYCAADDYLGGDNWYLGPYDWGQGTLVTVSS

SEQ ID NO: 311 - protein, 126 aa, synthetic construct
  REGION 1..126: note = Description of Artificial Sequence: Synthetic polypeptide
EVQLVESGGGLVQPGGSLRLSCAASGFTIDDYAMGWFRQAPGKEREFVAAVSGTGTIAYYADSVKGRFTISADNSKNTAYLQMNSLKPEDTAVYYCAAYYIDYDEALEETRGSYDWGQGTLVTVSS

SEQ ID NO: 312 - protein, 120 aa, synthetic construct
  REGION 1..120: note = Description of Artificial Sequence: Synthetic polypeptide
EVQLVESGGGLVQPGGSLRLSCAASGRTFNNYVMGWFRQAPGKERELVAGITSGRDITYYADSVKGRFTISADNSKNTAYLQMNSLKPEDTAVYYCAADGVLATTLNWDWGQGTLVTVSS

SEQ ID NO: 313 - protein, 120 aa, synthetic construct
  REGION 1..120: note = Description of Artificial Sequence: Synthetic polypeptide
EVQLVESGGGLVQPGGSLRLSCAASGSGISFNAMGWFRQAPGKERELVAAISRSGDTTYYADSVKGRFTISADNSKNTAYLQMNSLKPEDTAVYYCAADLTTWADGPYRWGQGTLVTVSS

SEQ ID NO: 314 - protein, 124 aa, synthetic construct
  REGION 1..124: note = Description of Artificial Sequence: Synthetic polypeptide
EVQLVESGGGLVQPGGSLRLSCAASGRTFSFYAMGWFRQAPGKEREFVAAINRGGKISHYADSVKGRFTISADNSKNTAYLQMNSLKPEDTAVYYCAAVRRYGNPPHDGSSYEWGQGTLVTVSS

SEQ ID NO: 315 - protein, 117 aa, synthetic construct
  REGION 1..117: note = Description of Artificial Sequence: Synthetic polypeptide
EVQLVESGGGLVQPGGSLRLSCAASGRTFSFYGMGWFRQAPGKERELVAIKFSGGTTDYADSVKGRFTISADNSKNTAYLQMNSLKPEDTAVYYCAAIAHEEGVYRWGQGTLVTVSS

SEQ ID NO: 316 - protein, 117 aa, synthetic construct
  REGION 1..117: note = Description of Artificial Sequence: Synthetic polypeptide
EVQLVESGGGLVQPGGSLRLSCAASGGIFRFNAMGWFRQAPGKERELVAGISGSGGDTYYADSVKGRFTISADNSKNTAYLQMNSLKPEDTAVYYCAAFRGIMRPDWGQGTLVTVSS

SEQ ID NO: 317 - protein, 124 aa, synthetic construct
  REGION 1..124: note = Description of Artificial Sequence: Synthetic polypeptide
EVQLVESGGGLVQPGGSLRLSCAASGRTFSFYAMGWFRQAPGKEREFVAAINRGGKISHYADSVKGRFTISADNSKNTAYLQMNSLKPEDTAVYYCAAVRRYGSPPHDGSSYEWGQGTLVTVSS

SEQ ID NO: 318 - protein, 116 aa, synthetic construct
  REGION 1..116: note = Description of Artificial Sequence: Synthetic polypeptide
EVQLVESGGGLVQPGGSLRLSCAASGSDFSLNAMGWFRQAPGKEREFVAAISWSGGSTLYADSVKGRFTISADNSKNTAYLQMNSLKPEDTAVYYCASNESDAYNWGQGTLVTVSS

SEQ ID NO: 319 - protein, 117 aa, synthetic construct
  REGION 1..117: note = Description of Artificial Sequence: Synthetic polypeptide
EVQLVESGGGLVQPGGSLRLSCAASGRTLVNYDMGWFRQAPGKEREFVAAIRWSGGITWYADSVKGRFTISADNSKNTAYLQMNSLKPEDTAVYYCAAFRGIMLPPWGQGTLVTVSS

SEQ ID NO: 320 - protein, 125 aa, synthetic construct
  REGION 1..125: note = Description of Artificial Sequence: Synthetic polypeptide
EVQLVESGGGLVQPGGSLRLSCAASGRTFEKDAMGWFRQAPGKEREMVAAIRWSGGITCYADSVKGRFTISADNSKNTAYLQMNSLKPEDTAVYYCAAYGSLPDDYDGLECEYDWGQGTLVTVSS

SEQ ID NO: 321 - protein, 115 aa, synthetic construct
  REGION 1..115: note = Description of Artificial Sequence: Synthetic polypeptide
EVQLVESGGGLVQPGGSLRLSCAASGSFFKINAMGWFRQAPGKEREFVAGITRSGGSTYYADSVKGRFTISADNSKNTAYLQMNSLKPEDTAVYYCAAESLGRWWGQGTLVTVSS

SEQ ID NO: 322 - protein, 114 aa, synthetic construct
  REGION 1..114: note = Description of Artificial Sequence: Synthetic polypeptide
EVQLVESGGGLVQPGGSLRLSCAASGRTFSIDAMGWFRQAPGKEREFVAAIRWSGGITWYADSVKGRFTISADNSKNTAYLQMNSLKPEDTAVYYCAASHDSDWGQGTLVTVSS

SEQ ID NO: 323 - protein, 124 aa, synthetic construct
  REGION 1..124: note = Description of Artificial Sequence: Synthetic polypeptide
EVQLVESGGGLVQPGGSLRLSCAASGRTFSIDAMGWFRQAPGKEREFVAAIRWSGGITWYADSVKGRFTISADNSKNTAYLQMNSLKPEDTAVYYCAASHDSDYGGTNANLYDWGQGTLVTVSS

SEQ ID NO: 324 - protein, 122 aa, synthetic construct
  REGION 1..122: note = Description of Artificial Sequence: Synthetic polypeptide
EVQLVESGGGLVQPGGSLRLSCAASGRTDRSNVMGWFRQAPGKEREFVAAINRSGSTFYADSVKGRFTISADNSKNTAYLQMNSLKPEDTAVYYCAKTKRTGIFTTARMVDWGQGTLVTVSS

SEQ ID NO: 325 - protein, 123 aa, synthetic construct
  REGION 1..123: note = Description of Artificial Sequence: Synthetic polypeptide
EVQLVESGGGLVQPGGSLRLSCAASGSFFSINVMGWFRQAPGKERELVAATGRRGGPTYYADSVKGRFTISADNSKNTAYLQMNSLKPEDTAVYYCAAHRIVVGGTSVGDWRWGQGTLVTVSS

SEQ ID NO: 326 - protein, 116 aa, synthetic construct
  REGION 1..116: note = Description of Artificial Sequence: Synthetic polypeptide
EVQLVESGGGLVQPGGSLRLSCAASGFTWGDYTMGWFRQAPGKEREGVAAIDSDGRTRYADSVKGRFTISADNSKNTAYLQMNSLKPEDTAVYYCAAALDGYSGNWGQGTLVTVSS

SEQ ID NO: 327 - protein, 121 aa, synthetic construct
  REGION 1..121: note = Description of Artificial Sequence: Synthetic polypeptide
EVQLVESGGGLVQPGGSLRLSCAASGNIFSLNTMGWFRQAPGKEREFVAAINCSGNHPYYADSVKGRFTISADNSKNTAYLQMNSLKPEDTAVYYCAAIVTYSDDDGRDNWGQGTLVTVSS

SEQ ID NO: 328 - protein, 127 aa, synthetic construct
  REGION 1..127: note = Description of Artificial Sequence: Synthetic polypeptide
EVQLVESGGGLVQPGGSLRLSCAASGSIFSINAMGWFRQAPGKEREFVAAVSGSGDDTYYADSVKGRFTISADNSKNTAYLQMNSLKPEDTAVYYCAAVQAYSSSSDYYSQEGAYDWGQGTLVTVSS

SEQ ID NO: 329 - protein, 120 aa, synthetic construct
  REGION 1..120: note = Description of Artificial Sequence: Synthetic polypeptide
EVQLVESGGGLVQPGGSLRLSCAASGFTFPAYVMGWFRQAPGKERELLAVITRDGSTHYADSVKGRFTISADNSKNTAYLQMNSLKPEDTAVYYCAVNGRWRIWSSRNPWGQGTLVTVSS

SEQ ID NO: 330 - protein, 126 aa, synthetic construct
  REGION 1..126: note = Description of Artificial Sequence: Synthetic polypeptide
EVQLVESGGGLVQPGGSLRLSCAASGFSFDDDYVMGWFRQAPGKERELVAVIGWGGKETWYADSVKGRFTISADNSKNTAYLQMNSLKPEDTAVYYCAAEDPSMGYYTLEEYEYDWGQGTLVTVSS

SEQ ID NO: 331 - protein, 123 aa, synthetic construct
  REGION 1..123: note = Description of Artificial Sequence: Synthetic polypeptide
EVQLVESGGGLVQPGGSLRLSCAASGPTFDTYVMGWFRQAPGKEREFVAAISMSGDDTAYADSVKGRFTISADNSKNTAYLQMNSLKPEDTAVYYCATDLRGRGDVSEYEYDWGQGTLVTVSS

SEQ ID NO: 332 - protein, 118 aa, synthetic construct
  REGION 1..118: note = Description of Artificial Sequence: Synthetic polypeptide
EVQLVESGGGLVQPGGSLRLSCAASGRTFSIDAMGWFRQAPGKEREFVGAITWGGGNTYYADSVKGRFTISADNSKNTAYLQMNSLKPEDTAVYYCAAIVTDGDYDGWGQGTLVTVSS

SEQ ID NO: 333 - protein, 121 aa, synthetic construct
  REGION 1..121: note = Description of Artificial Sequence: Synthetic polypeptide
EVQLVESGGGLVQPGGSLRLSCAASGNTFSINVMGWFRQAPGKEREFVAAINWNGGSTDYADSVKGRFTISADNSKNTAYLQMNSLKPEDTAVYYCAAIVTYSDYDLDNDWGQGTLVTVSS

SEQ ID NO: 334 - protein, 122 aa, synthetic construct
  REGION 1..122: note = Description of Artificial Sequence: Synthetic polypeptide
EVQLVESGGGLVQPGGSLRLSCAASGFTFSTHWMGWFRQAPGKEREVVAVIYTSDGSTYYADSVKGRFTISADNSKNTAYLQMNSLKPEDTAVYYCAANEYGLGSSIYAYKWGQGTLVTVSS

SEQ ID NO: 335 - protein, 121 aa, synthetic construct
  REGION 1..121: note = Description of Artificial Sequence: Synthetic polypeptide
EVQLVESGGGLVQPGGSLRLSCAASGRTFSISAMGWFRQAPGKEREFVAAISRSGGTTYYADSVKGRFTISADNSKNTAYLQMNSLKPEDTAVYYCATDEDYALGPNEYDWGQGTLVTVSS

SEQ ID NO: 336 - protein, 129 aa, synthetic construct
  REGION 1..129: note = Description of Artificial Sequence: Synthetic polypeptide
EVQLVESGGGLVQPGGSLRLSCAASGSTFRINAMGWFRQAPGKERELVAAISPAALTTYYADSVKGRFTISADNSKNTAYLQMNSLKPEDTAVYYCAAEPYGSGSLYDDYDGLPIKYDWGQGTLVTVSS

SEQ ID NO: 337 - protein, 126 aa, synthetic construct
  REGION 1..126: note = Description of Artificial Sequence: Synthetic polypeptide
EVQLVESGGGLVQPGGSLRLSCAASGFTDGIDAMGWFRQAPGKEREFVAAISWSNDITYYADSVKGRFTISADNSKNTAYLQMNSLKPEDTAVYYCAAALSEVWRGSENLREGYDWGQGTLVTVSS

SEQ ID NO: 338 - protein, 123 aa, synthetic construct
  REGION 1..123: note = Description of Artificial Sequence: Synthetic polypeptide
EVQLVESGGGLVQPGGSLRLSCAASGLPVDYYAMGWFRQAPGKERELVAAISGSGDSTYYADSVKGRFTISADNSKNTAYLQMNSLKPEDTAVYYCAAQTEDSASIFGYGMDWGQGTLVTVSS

SEQ ID NO: 339 - protein, 123 aa, synthetic construct
  REGION 1..123: note = Description of Artificial Sequence: Synthetic polypeptide
EVQLVESGGGLVQPGGSLRLSCAASGRTLSTVNMGWFRQAPGKEREFVGAISRSGETTWYADSVKGRFTISADNSKNTAYLQMNSLKPEDTAVYYCAVDCPDYYSDYECPLEWGQGTLVTVSS

SEQ ID NO: 340 - protein, 118 aa, synthetic construct
  REGION 1..118: note = Description of Artificial Sequence: Synthetic polypeptide
EVQLVESGGGLVQPGGSLRLSCAASGFSFDDYAMGWFRQAPGKERELVAAVRWSGGITWYADSVKGRFTISADNSKNTAYLQMNSLKPEDTAVYYCAAGDTGGAAYGWGQGTLVTVSS

SEQ ID NO: 341 - protein, 117 aa, synthetic construct
  REGION 1..117: note = Description of Artificial Sequence: Synthetic polypeptide
EVQLVESGGGLVQPGGSLRLSCAASGSTLSINAMGWFRQAPGKEREGVSWISSSDGSTYYADSVKGRFTISADNSKNTAYLQMNSLKPEDTAVYYCAAALDGYSGRWGQGTLVTVSS

SEQ ID NO: 342 - protein, 128 aa, synthetic construct
  REGION 1..128: note = Description of Artificial Sequence: Synthetic polypeptide
EVQLVESGGGLVQPGGSLRLSCAASGSSVSIDAMGWFRQAPGKEREFVAGISRSGDTTYYADSVKGRFTISADNSKNTAYLQMNSLKPEDTAVYYCAASYNVYYNNYYYPISRDEYDWGQGTLVTVSS

SEQ ID NO: 343 - protein, 119 aa, synthetic construct
  REGION 1..119: note = Description of Artificial Sequence: Synthetic polypeptide
EVQLVESGGGLVQPGGSLRLSCAASGSIFRVNVMGWFRQAPGKERELVAVTWSGGSTNYADSVKGRFTISADNSKNTAYLQMNSLKPEDTAVYYCAAIAYEEGVYRWDWGQGTLVTVSS

SEQ ID NO: 344 - protein, 122 aa, synthetic construct
  REGION 1..122: note = Description of Artificial Sequence: Synthetic polypeptide
EVQLVESGGGLVQPGGSLRLSCAASGRTFSFYAMGWFRQAPGKEREFVAVVNWSGRRTYYADSVKGRFTISADNSKNTAYLQMNSLKPEDTAVYYCAASSRMGVDDPETYGWGQGTLVTVSS

SEQ ID NO: 345 - protein, 125 aa, synthetic construct
  REGION 1..125: note = Description of Artificial Sequence: Synthetic polypeptide
EVQLVESGGGLVQPGGSLRLSCAASGFTFDDAAMGWFRQAPGKEREFVAAVRWRGGITWYADSVKGRFTISADNSKNTAYLQMNSLKPEDTAVYYCAAQGSLYDDYDGLPIKYDWGQGTLVTVSS

SEQ ID NO: 346 - protein, 113 aa, synthetic construct
  REGION 1..113: note = Description of Artificial Sequence: Synthetic polypeptide
EVQLVESGGGLVQPGGSLRLSCAASGSIFRINAMGWFRQAPGKERELVASISRFGRTNYADSVKGRFTISADNSKNTAYLQMNSLKPEDTAVYYCAANGIESWGQGTLVTVSS

SEQ ID NO: 347 - protein, 116 aa, synthetic construct
  REGION 1..116: note = Description of Artificial Sequence: Synthetic polypeptide
EVQLVESGGGLVQPGGSLRLSCAASGFTWGDYTMGWFRQAPGKEREFVASITSGGRMWYADSVKGRFTISADNSKNTAYLQMNSLKPEDTAVYYCAAALDGYSGSWGQGTLVTVSS

SEQ ID NO: 348 - protein, 114 aa, synthetic construct
  REGION 1..114: note = Description of Artificial Sequence: Synthetic polypeptide
EVQLVESGGGLVQPGGSLRLSCAASGFRFSSYGMGWFRQAPGKEREGVAAIGSDGSTSYADSVKGRFTISADNSKNTAYLQMNSLKPEDTAVYYCASWDGRQVWGQGTLVTVSS

SEQ ID NO: 349 - protein, 116 aa, synthetic construct
  REGION 1..116: note = Description of Artificial Sequence: Synthetic polypeptide
EVQLVESGGGLVQPGGSLRLSCAASGRTFDNYNMGWFRQAPGKEREFVAAISWNGVTIYYADSVKGRFTISADNSKNTAYLQMNSLKPEDTAVYYCAAQGSLYDDWGQGTLVTVSS

SEQ ID NO: 350 - protein, 116 aa, synthetic construct
  REGION 1..116: note = Description of Artificial Sequence: Synthetic polypeptide
EVQLVESGGGLVQPGGSLRLSCAASGFTFSTYSMGWFRQAPGKEREFVAAISSGGLKAYADSVKGRFTISADNSKNTAYLQMNSLKPEDTAVYYCAAALDDYSGSWGQGTLVTVSS

SEQ ID NO: 351 - protein, 120 aa, synthetic construct
  REGION 1..120: note = Description of Artificial Sequence: Synthetic polypeptide
EVQLVESGGGLVQPGGSLRLSCAASGYTFRAYVMGWFRQAPGKERELLAVITRDGSTHYADSVKGRFTISADNSKNTAYLQMNSLKPEDTAVYYCAVNGRWRSWSSRNPWGQGTLVTVSS

SEQ ID NO: 352 - protein, 118 aa, synthetic construct
  REGION 1..118: note = Description of Artificial Sequence: Synthetic polypeptide
EVQLVESGGGLVQPGGSLRLSCAASGRTFSIYAMGWFRQAPGKEREFVAAISRGSNSTDYADSVKGRFTISADNSKNTAYLQMNSLKPEDTAVYYCAAIVTYTDYDLWGQGTLVTVSS

SEQ ID NO: 353 - protein, 118 aa, synthetic construct
  REGION 1..118: note = Description of Artificial Sequence: Synthetic polypeptide
EVQLVESGGGLVQPGGSLRLSCAASGRTISSYAMGWFRQAPGKERELVAAISKSSISTYYADSVKGRFTISADNSKNTAYLQMNSLKPEDTAVYYCALGPVRRSRLEWGQGTLVTVSS

SEQ ID NO: 354 - protein, 126 aa, synthetic construct
  REGION 1..126: note = Description of Artificial Sequence: Synthetic polypeptide
EVQLVESGGGLVQPGGSLRLSCAASGPTFDTYVMGWFRQAPGKEREFVAAISWTGDSSSDGDTYYADSVKGRFTISADNSKNTAYLQMNSLKPEDTAVYYCAAAIFDVTDYERADWGQGTLVTVSS

SEQ ID NO: 355 - protein, 115 aa, synthetic construct
  REGION 1..115: note = Description of Artificial Sequence: Synthetic polypeptide
EVQLVESGGGLVQPGGSLRLSCAASGFTLGNYAMGWFRQAPGKERELVSAITWSDGSSYYADSVKGRFTISADNSKNTAYLQMNSLKPEDTAVYYCASTRFAGRWGQGTLVTVSS

SEQ ID NO: 356 - protein, 126 aa, synthetic construct
  REGION 1..126: note = Description of Artificial Sequence: Synthetic polypeptide
EVQLVESGGGLVQPGGSLRLSCAASGNIDRLYAMGWFRQAPGKEREPVAAISPAAVTAGMTYYADSVKGRFTISADNSKNTAYLQMNSLKPEDTAVYYCAAYGSGSYYYTDDELDWGQGTLVTVSS

SEQ ID NO: 357 - protein, 124 aa, synthetic construct
  REGION 1..124: note = Description of Artificial Sequence: Synthetic polypeptide
EVQLVESGGGLVQPGGSLRLSCAASGRTFGRRAMGWFRQAPGKERELVAAIRWSGKETWYADSVKGRFTISADNSKNTAYLQMNSLKPEDTAVYYCAAGNGGRTYGHSRARYEWGQGTLVTVSS

SEQ ID NO: 358 - protein, 118 aa, synthetic construct
  REGION 1..118: note = Description of Artificial Sequence: Synthetic polypeptide
EVQLVESGGGLVQPGGSLRLSCAASGRTFSIGAMGWFRQAPGKEREYVGSITWRGGNTYYADSVKGRFTISADNSKNTAYLQMNSLKPEDTAVYYCAAGVTGGAAYGWGQGTLVTVSS

SEQ ID NO: 359 - protein, 116 aa, synthetic construct
  REGION 1..116: note = Description of Artificial Sequence: Synthetic polypeptide
EVQLVESGGGLVQPGGSLRLSCAASGLTFSTYWMGWFRQAPGKEREVVAVIYTSDGSTYYADSVKGRFTISADNSKNTAYLQMNSLKPEDTAVYYCATIDGSWREWGQGTLVTVSS

SEQ ID NO: 360 - protein, 126 aa, synthetic construct
  REGION 1..126: note = Description of Artificial Sequence: Synthetic polypeptide
EVQLVESGGGLVQPGGSLRLSCAASGFGIDFYAMGWFRQAPGKEREFVAAISGSGDDTYYADSVKGRFTISADNSKNTAYLQMNSLKPEDTAVYYCAASASDYGLGLELFHDEYNWGQGTLVTVSS

SEQ ID NO: 361 - protein, 121 aa, synthetic construct
  REGION 1..121: note = Description of Artificial Sequence: Synthetic polypeptide
EVQLVESGGGLVQPGGSLRLSCAASGNILSLNTMGWFRQAPGKEREFVASVTWGFGSTSYADSVKGRFTISADNSKNTAYLQMNSLKPEDTAVYYCAAIVTYSDYDLGNDWGQGTLVTVSS

SEQ ID NO: 362 - protein, 126 aa, synthetic construct
  REGION 1..126: note = Description of Artificial Sequence: Synthetic polypeptide
EVQLVESGGGLVQPGGSLRLSCAASGSIYSLDAMGWFRQAPGKEREFVAAISPAALTTYYADSVKGRFTISADNSKNTAYLQMNSLKPEDTAVYYCAGSSRIYIYSDSLSERSYDWGQGTLVTVSS

SEQ ID NO: 363 - protein, 119 aa, synthetic construct
  REGION 1..119: note = Description of Artificial Sequence: Synthetic polypeptide
EVQLVESGGGLVQPGGSLRLSCAASGRTFSFYGMGWFRQAPGKERELVAIKFSGGTTDYADSVKGRFTISADNSKNTAYLQMNSLKPEDTAVYYCAAIAHEEGVYRWDWGQGTLVTVSS

SEQ ID NO: 364 - protein, 118 aa, synthetic construct
  REGION 1..118: note = Description of Artificial Sequence: Synthetic polypeptide
EVQLVESGGGLVQPGGSLRLSCAASGRTFSKYAMGWFRQAPGKEREFVAAIRWSGGTTFYADSVKGRFTISADNSKNTAYLQMNSLKPEDTAVYYCAAGGWGTGRYNWGQGTLVTVSS

SEQ ID NO: 365 - protein, 116 aa, synthetic construct
  REGION 1..116: note = Description of Artificial Sequence: Synthetic polypeptide
EVQLVESGGGLVQPGGSLRLSCAASGSIFSIYAMDWFRQAPGKEREFVAAISSDDSTTYYADSVKGRFTISADNSKNTAYLQMNSLKPEDTAVYYCTAVLPAYDDWGQGTLVTVSS

SEQ ID NO: 366 - protein, 117 aa, synthetic construct
  REGION 1..117: note = Description of Artificial Sequence: Synthetic polypeptide
EVQLVESGGGLVQPGGSLRLSCAASGFNSGSYTMGWFRQAPGKEREGVSYISSSDGRTYYADSVKGRFTISADNSKNTAYLQMNSLKPEDTAVYYCAAGLNGAAAAWGQGTLVTVSS

SEQ ID NO: 367 - protein, 114 aa, synthetic construct
  REGION 1..114: note = Description of Artificial Sequence: Synthetic polypeptide
EVQLVESGGGLVQPGGSLRLSCAASGRTFSNGPMGWFRQAPGKEREFVAHISTGGATNYADSVKGRFTISADNSKNTAYLQMNSLKPEDTAVYYCASWDGRQGWGQGTLVTVSS

SEQ ID NO: 368 - protein, 117 aa, synthetic construct
  REGION 1..117: note = Description of Artificial Sequence: Synthetic polypeptide
EVQLVESGGGLVQPGGSLRLSCAASGRALSSYSMGWFRQAPGKEREFVALITRSGGTTFYADSVKGRFTISADNSKNTAYLQMNSLKPEDTAVYYCALDNRHSYVDWGQGTLVTVSS

SEQ ID NO: 369 - protein, 121 aa, synthetic construct
  REGION 1..121: note = Description of Artificial Sequence: Synthetic polypeptide
EVQLVESGGGLVQPGGSLRLSCAASGSIGSINAMGWFRQAPGKEREFVAAISWSGGATNYADSVKGRFTISADNSKNTAYLQMNSLKPEDTAVYYCAASVAYSDYDLGNDWGQGTLVTVSS

SEQ ID NO: 370 - protein, 121 aa, synthetic construct
  REGION 1..121: note = Description of Artificial Sequence: Synthetic polypeptide
EVQLVESGGGLVQPGGSLRLSCAASGLSFDDYAMGWFRQAPGKEREFVAAISGRSGNTYYADSVKGRFTISADNSKNTAYLQMNSLKPEDTAVYYCALIQRRAPYSRLETWGQGTLVTVSS

SEQ ID NO: 371 - protein, 119 aa, synthetic construct
  REGION 1..119: note = Description of Artificial Sequence: Synthetic polypeptide
EVQLVESGGGLVQPGGSLRLSCAASGFTFSIYAMGWFRQAPGKEREGVAAISWSGGTTYYADSVKGRFTISADNSKNTAYLQMNSLKPEDTAVYYCAAAAGWVAEYGYWGQGTLVTVSS

SEQ ID NO: 372 - protein, 123 aa, synthetic construct
  REGION 1..123: note = Description of Artificial Sequence: Synthetic polypeptide
EVQLVESGGGLVQPGGSLRLSCAASGGTFSSYAMGWFRQAPGKEREFVATISSNGNTTYYADSVKGRFTISADNSKNTAYLQMNSLKPEDTAVYYCAADLRVLRLRRYEYNYWGQGTLVTVSS

SEQ ID NO: 373 - protein, 116 aa, synthetic construct
  REGION 1..116: note = Description of Artificial Sequence: Synthetic polypeptide
EVQLVESGGGLVQPGGSLRLSCAASGFTFRSNAMGWFRQAPGKEREGVAAISTSGGITYYADSVKGRFTISADNSKNTAYLQMNSLKPEDTAVYYCAAERDGYGYWGQGTLVTVSS

SEQ ID NO: 374 - protein, 116 aa, synthetic construct
  REGION 1..116: note = Description of Artificial Sequence: Synthetic polypeptide
EVQLVESGGGLVQPGGSLRLSCAASGFTFDDYAMGWFRQAPGKERELVAGISWNGGITYYADSVKGRFTISADNSKNTAYLQMNSLKPEDTAVYYCAVVRAGYDYWGQGTLVTVSS

SEQ ID NO: 375 - protein, 116 aa, synthetic construct
  REGION 1..116: note = Description of Artificial Sequence: Synthetic polypeptide
EVQLVESGGGLVQPGGSLRLSCAASGSTFSIYAMGWFRQAPGKEREWVATISWSGGSTNYADSVKGRFTISADNSKNTAYLQMNSLKPEDTAVYYCAVGRSGRDYWGQGTLVTVSS

SEQ ID NO: 376 - protein, 118 aa, synthetic construct
  REGION 1..118: note = Description of Artificial Sequence: Synthetic polypeptide
EVQLVESGGGLVQPGGSLRLSCAASGRAFESYAMGWFRQAPGKEREFVAAIRWSGGSTYYADSVKGRFTISADNSKNTAYLQMNSLKPEDTAVYYCATGGWGTGRYNWGQGTLVTVSS

SEQ ID NO: 377 - protein, 119 aa, synthetic construct
  REGION 1..119: note = Description of Artificial Sequence: Synthetic polypeptide
EVQLVESGGGLVQPGGSLRLSCAASGRIFSDYAMGWFRQAPGKEREFVATINGDGDSTNYADSVKGRFTISADNSKNTAYLQMNSLKPEDTAVYYCAANTYWYYTYDSWGQGTLVTVSS

SEQ ID NO: 378 - protein, 119 aa, synthetic construct
  REGION 1..119: note = Description of Artificial Sequence: Synthetic polypeptide
EVQLVESGGGLVQPGGSLRLSCAASGRIFSDYAMGWFRQAPGKEREFVATINGDGDSTNYADSVKGRFTISADNSKNTAYLQMNSLKPEDTAVYYCAANTYCNYTYDSWGQGTLVTVSS

SEQ ID NO: 379 - protein, 118 aa, synthetic construct
  REGION 1..118: note = Description of Artificial Sequence: Synthetic polypeptide
EVQLVESGGGLVQPGGSLRLSCAASGRTLSRSNMGWFRQAPGKEREFVAAVRWSGGITWYADSVKGRFTISADNSKNTAYLQMNSLKPEDTAVYYCALGPVRRSRLEWGQGTLVTVSS

SEQ ID NO: 380 - protein, 116 aa, synthetic construct
  REGION 1..116: note = Description of Artificial Sequence: Synthetic polypeptide
EVQLVESGGGLVQPGGSLRLSCAASGFTFSTYAMGWFRQAPGKEREFVAAITWSGGSTNYADSVKGRFTISADNSKNTAYLQMNSLKPEDTAVYYCAAGRAGRDSWGQGTLVTVSS

SEQ ID NO: 381 - protein, 117 aa, synthetic construct
  REGION 1..117: note = Description of Artificial Sequence: Synthetic polypeptide
EVQLVESGGGLVQPGGSLRLSCAASGRTFNSYAMGWFRQAPGKEREFVAGITRSAVSTSYADSVKGRFTISADNSKNTAYLQMNSLKPEDTAVYYCAAFRGIMRPDWGQGTLVTVSS

SEQ ID NO: 382 - protein, 117 aa, synthetic construct
  REGION 1..117: note = Description of Artificial Sequence: Synthetic polypeptide
EVQLVESGGGLVQPGGSLRLSCAASGFTFRNYVMGWFRQAPGKEREFVASITWSGGTTYYADSVKGRFTISADNSKNTAYLQMNSLKPEDTAVYYCAAGRGSGRDYWGQGTLVTVSS

SEQ ID NO: 383 - protein, 117 aa, synthetic construct
  REGION 1..117: note = Description of Artificial Sequence: Synthetic polypeptide
EVQLVESGGGLVQPGGSLRLSCAASGRALSSNSMGWFRQAPGKEREFVALITRSGGTTFYADSVKGRFTISADNSKNTAYLQMNSLKPEDTAVYYCALNNRRRYVDWGQGTLVTVSS

SEQ ID NO: 384 - protein, 116 aa, synthetic construct
  REGION 1..116: note = Description of Artificial Sequence: Synthetic polypeptide
EVQLVESGGGLVQPGGSLRLSCAASGRTFSSYAMGWFRQAPGKEREFVAAISWSGGSTYYADSVKGRFTISADNSKNTAYLQMNSLKPEDTAVYYCAVGRNGRDYWGQGTLVTVSS

SEQ ID NO: 385 - protein, 121 aa, synthetic construct
  REGION 1..121: note = Description of Artificial Sequence: Synthetic polypeptide
EVQLVESGGGLVQPGGSLRLSCAASGSTFSIYAMGWFRQAPGKEREFVAAISWSGGNTYYADSVKGRFTISADNSKNTAYLQMNSLKPEDTAVYYCAAVPTIAYNTGYDYWGQGTLVTVSS

SEQ ID NO: 386 - protein, 118 aa, synthetic construct
  REGION 1..118: note = Description of Artificial Sequence: Synthetic polypeptide
EVQLVESGGGLVQPGGSLRLSCAASGRTFDDYAMGWFRQAPGKERELVSGITWSGGSTYYADSVKGRFTISADNSKNTAYLQMNSLKPEDTAVYYCAAVLGYDGYDYWGQGTLVTVSS

SEQ ID NO: 387 - protein, 123 aa, synthetic construct
  REGION 1..123: note = Description of Artificial Sequence: Synthetic polypeptide
EVQLVESGGGLVQPGGSLRLSCAASGRTFSIYAMGWFRQAPGKERELVSAISTDDGSTYYADSVKGRFTISADNSKNTAYLQMNSLKPEDTAVYYCAAALPDDTYLATTYDYWGQGTLVTVSS

SEQ ID NO: 388 - protein, 123 aa, synthetic construct
  REGION 1..123: note = Description of Artificial Sequence: Synthetic polypeptide
EVQLVESGGGLVQPGGSLRLSCAASGSIFSDNVMGWFRQAPGKEREMVAAIRWSGGITWYADSVKGRFTISADNSKNTAYLQMNSLKPEDTAVYYCATDLSGRGDVSEYEYDWGQGTLVTVSS

SEQ ID NO: 389 - protein, 117 aa, synthetic construct
  REGION 1..117: note = Description of Artificial Sequence: Synthetic polypeptide
EVQLVESGGGLVQPGGSLRLSCAASGEIASIIAMGWFRQAPGKEREWVSAINSGGDTYYADSVKGRFTISADNSKNTAYLQMNSLKPEDTAVYYCAADRSRTIWPDWGQGTLVTVSS

SEQ ID NO: 390 - protein, 116 aa, synthetic construct
  REGION 1..116: note = Description of Artificial Sequence: Synthetic polypeptide
EVQLVESGGGLVQPGGSLRLSCAASGRTFSVSTMGWFRQAPGKEREIVAAITWSGSATYYADSVKGRFTISADNSKNTAYLQMNSLKPEDTAVYYCAAQRRWSQDWGQGTLVTVSS

SEQ ID NO: 391 - protein, 117 aa, synthetic construct
  REGION 1..117: note = Description of Artificial Sequence: Synthetic polypeptide
EVQLVESGGGLVQPGGSLRLSCAASGRTFSSYAMGWFRQAPGKERELVAGITGGGSSTYYADSVKGRFTISADNSKNTAYLQMNSLKPEDTAVYYCAAVTRYGYDYWGQGTLVTVSS

SEQ ID NO: 392 - protein, 124 aa, synthetic construct
  REGION 1..124: note = Description of Artificial Sequence: Synthetic polypeptide
EVQLVESGGGLVQPGGSLRLSCAASGIPFRSRTMGWFRQAPGKEREFVAGITRNSIRTRYADSVKGRFTISADNSKNTAYLQMNSLKPEDTAVYYCAAAPRRPYLPIRIRDYIWGQGTLVTVSS

SEQ ID NO: 393 - protein, 120 aa, synthetic construct
  REGION 1..120: note = Description of Artificial Sequence: Synthetic polypeptide
EVQLVESGGGLVQPGGSLRLSCAASGRTIVPYTMGWFRQAPGKEREFVAAISWSGASTIYADSVKGRFTISADNSKNTAYLQMNSLKPEDTAVYYCAIGGTLYDRRRFEWGQGTLVTVSS

SEQ ID NO: 394 - protein, 116 aa, synthetic construct
  REGION 1..116: note = Description of Artificial Sequence: Synthetic polypeptide
EVQLVESGGGLVQPGGSLRLSCAASGFTFSNNAMGWFRQAPGKEREGVAAINGSGSITYYADSVKGRFTISADNSKNTAYLQMNSLKPEDTAVYYCAAARDDYGYWGQGTLVTVSS

SEQ ID NO: 395 - protein, 117 aa, synthetic construct
  REGION 1..117: note = Description of Artificial Sequence: Synthetic polypeptide
EVQLVESGGGLVQPGGSLRLSCAASGRTFSIYGMGWFRQAPGKEREGVAGISWSDGSTSYADSVKGRFTISADNSKNTAYLQMNSLKPEDTAVYYCAAASDASFDYWGQGTLVTVSS

SEQ ID NO: 396 - protein, 116 aa, synthetic construct
  REGION 1..116: note = Description of Artificial Sequence: Synthetic polypeptide
EVQLVESGGGLVQPGGSLRLSCAASGGTFSDYGMGWFRQAPGKEREGVASISWNDGSTSYADSVKGRFTISADNSKNTAYLQMNSLKPEDTAVYYCAAATADYDYWGQGTLVTVSS

SEQ ID NO: 397 - protein, 122 aa, synthetic construct
  REGION 1..122: note = Description of Artificial Sequence: Synthetic polypeptide
EVQLVESGGGLVQPGGSLRLSCAASGSTFSTYAMGWFRQAPGKERELVAAISWSSGTTYYADSVKGRFTISADNSKNTAYLQMNSLKPEDTAVYYCAAVLVTSDGVSEYNYWGQGTLVTVSS

SEQ ID NO: 398 - protein, 126 aa, synthetic construct
  REGION 1..126: note = Description of Artificial Sequence: Synthetic polypeptide
EVQLVESGGGLVQPGGSLRLSCAASGFLFDSYAMGWFRQAPGKEREPVAAISPAALTTYYADSVKGRFTISADNSKNTAYLQMNSLKPEDTAVYYCAAYYTDYDEALEETRGSYDWGQGTLVTVSS

SEQ ID NO: 399 - protein, 116 aa, synthetic construct
  REGION 1..116: note = Description of Artificial Sequence: Synthetic polypeptide
EVQLVESGGGLVQPGGSLRLSCAASGFTLSNYAMGWFRQAPGKEREGVAAISWNSGSTYYADSVKGRFTISADNSKNTAYLQMNSLKPEDTAVYYCATDARRYGYWGQGTLVTVSS

SEQ ID NO: 400 - protein, 121 aa, synthetic construct
  REGION 1..121: note = Description of Artificial Sequence: Synthetic polypeptide
EVQLVESGGGLVQPGGSLRLSCAASGSTFGNYAMGWFRQAPGKEREFVAAISRSGSITYYADSVKGRFTISADNSKNTAYLQMNSLKPEDTAVYYCATDEDYALGPNEYDWGQGTLVTVSS

SEQ ID NO: 401 - protein, 117 aa, synthetic construct
  REGION 1..117: note = Description of Artificial Sequence: Synthetic polypeptide
EVQLVESGGGLVQPGGSLRLSCAASGRTFSIYAMGWFRQAPGKERELVAGISWGGDSTYYADSVKGRFTISADNSKNTAYLQMNSLKPEDTAVYYCAAVAGNGYDYWGQGTLVTVSS

SEQ ID NO: 402 - protein, 117 aa, synthetic construct
  REGION 1..117: note = Description of Artificial Sequence: Synthetic polypeptide
EVQLVESGGGLVQPGGSLRLSCAASGFNSGSYTMGWFRQAPGKEREGVSYISSSDGRTYYADSVKGRFTISADNSKNTAYLQMNSLKPEDTAVYYCAAALDGYSGSWGQGTLVTVSS

SEQ ID NO: 403 - protein, 115 aa, synthetic construct
  REGION 1..115: note = Description of Artificial Sequence: Synthetic polypeptide
EVQLVESGGGLVQPGGSLRLSCAASGLTFWTSGMGWFRQAPGKEREYVAAISRSGSLKGYADSVKGRFTISADNSKNTAYLQMNSLKPEDTAVYYCATVATALIWGQGTLVTVSS

SEQ ID NO: 404 - protein, 117 aa, synthetic construct
  REGION 1..117: note = Description of Artificial Sequence: Synthetic polypeptide
EVQLVESGGGLVQPGGSLRLSCAASGFTFSINAMGWFRQAPGKERELVSGISWGGGSTYYADSVKGRFTISADNSKNTAYLQMNSLKPEDTAVYYCAAVNEDGFDYWGQGTLVTVSS

SEQ ID NO: 405 - protein, 116 aa, synthetic construct
  REGION 1..116: note = Description of Artificial Sequence: Synthetic polypeptide
EVQLVESGGGLVQPGGSLRLSCAASGFTFDDNAMGWFRQAPGKERELVAAISTSGSNTYYADSVKGRFTISADNSKNTAYLQMNSLKPEDTAVYYCAAELREYGYWGQGTLVTVSS

SEQ ID NO: 406 - protein, 115 aa, synthetic construct
  REGION 1..115: note = Description of Artificial Sequence: Synthetic polypeptide
EVQLVESGGGLVQPGGSLRLSCAASGRTFTSYNMGWFRQAPGKEREFLGSILWSDDSTNYADSVKGRFTISADNSKNTAYLQMNSLKPEDTAVYYCASWDGRQVWGQGTLVTVSS

SEQ ID NO: 407 - protein, 116 aa, synthetic construct
  REGION 1..116: note = Description of Artificial Sequence: Synthetic polypeptide
EVQLVESGGGLVQPGGSLRLSCAASGFTFRNYVMGWFRQAPGKEREFVAAINWNGSITYYADSVKGRFTISADNSKNTAYLQMNSLKPEDTAVYYCAAGRSARNYWGQGTLVTVSS

SEQ ID NO: 408 - protein, 121 aa, synthetic construct
  REGION 1..121: note = Description of Artificial Sequence: Synthetic polypeptide
EVQLVESGGGLVQPGGSLRLSCAASGRTFSSYAMGWFRQAPGKEREFVAAISTSGGITYYADSVKGRFTISADNSKNTAYLQMNSLKPEDTAVYYCATDRIEYSRGGYDYWGQGTLVTVSS

SEQ ID NO: 409 - protein, 117 aa, synthetic construct
  REGION 1..117: note = Description of Artificial Sequence: Synthetic polypeptide
EVQLVESGGGLVQPGGSLRLSCAASGSTFRKYAMGWFRQAPGKEREFVAAISSGGGSTNYADSVKGRFTISADNSKNTAYLQMNSLKPEDTAVYYCAAGRYRERDSWGQGTLVTVSS

SEQ ID NO: 410 - protein, 123 aa, synthetic construct
  REGION 1..123: note = Description of Artificial Sequence: Synthetic polypeptide
EVQLVESGGGLVQPGGSLRLSCAASGSTFSIYAMGWFRQAPGKEREFVAAISWSGDTTYYADSVKGRFTISADNSKNTAYLQMNSLKPEDTAVYYCAIDLPDDTYLATEYDYWGQGTLVTVSS

SEQ ID NO: 411 - protein, 119 aa, synthetic construct
  REGION 1..119: note = Description of Artificial Sequence: Synthetic polypeptide
EVQLVESGGGLVQPGGSLRLSCAASGSGFSPNVMGWFRQAPGKERELVAIKFSGGTTDYADSVKGRFTISADNSKNTAYLQMNSLKPEDTAVYYCAAIAYEEGVYRWDWGQGTLVTVSS

SEQ ID NO: 412 - protein, 117 aa, synthetic construct
  REGION 1..117: note = Description of Artificial Sequence: Synthetic polypeptide
EVQLVESGGGLVQPGGSLRLSCAASGRTLTNHDMGWFRQAPGKEREGVSYISMSDGRTYYADSVKGRFTISADNSKNTAYLQMNSLKPEDTAVYYCAAVLDGYSGSWGQGTLVTVSS

SEQ ID NO: 413 - protein, 117 aa, synthetic construct
  REGION 1..117: note = Description of Artificial Sequence: Synthetic polypeptide
EVQLVESGGGLVQPGGSLRLSCAASGSTFSIYAMGWFRQAPGKEREFVAAISRSGDSTYYADSVKGRFTISADNSKNTAYLQMNSLKPEDTAVYYCAAVTLDNYGYWGQGTLVTVSS

SEQ ID NO: 414 - protein, 126 aa, synthetic construct
  REGION 1..126: note = Description of Artificial Sequence: Synthetic polypeptide
EVQLVESGGGLVQPGGSLRLSCAASGGTASSYHMGWFRQAPGKEREFVAFIHRSGTSTYYADSVKGRFTISADNSKNTAYLQMNSLKPEDTAVYYCAADSITDRRSVAVAHTSYYWGQGTLVTVSS

SEQ ID NO: 415 - protein, 119 aa, synthetic construct
  REGION 1..119: note = Description of Artificial Sequence: Synthetic polypeptide
EVQLVESGGGLVQPGGSLRLSCAASGLTFSTYAMGWFRQAPGKEREIVAAITWSGGITYYADSVKGRFTISADNSKNTAYLQMNSLKPEDTAVYYCAAHGSILLDRIEWGQGTLVTVSS

SEQ ID NO: 416 - protein, 122 aa, synthetic construct
  REGION 1..122: note = Description of Artificial Sequence: Synthetic polypeptide
EVQLVESGGGLVQPGGSLRLSCAASGGTFSIYAMGWFRQAPGKERELVAAISSSGSITYYADSVKGRFTISADNSKNTAYLQMNSLKPEDTAVYYCAAAAALDGPGDMYDYWGQGTLVTVSS

SEQ ID NO: 417 - protein, 120 aa, synthetic construct
  REGION 1..120: note = Description of Artificial Sequence: Synthetic polypeptide
EVQLVESGGGLVQPGGSLRLSCAASGGTFDNYAMGWFRQAPGKERELVSGINSDGGSTYYADSVKGRFTISADNSKNTAYLQMNSLKPEDTAVYYCAAVPISSPSDRNYWGQGTLVTVSS

SEQ ID NO: 418 - protein, 120 aa, synthetic construct
  REGION 1..120: note = Description of Artificial Sequence: Synthetic polypeptide
EVQLVESGGGLVQPGGSLRLSCAASGRTFSLTAMGWFRQAPGKEREFVAAISPAALTTYYADSVKGRFTISADNSKNTAYLQMNSLKPEDTAVYYCASRRAFRLSSDYEWGQGTLVTVSS

SEQ ID NO: 419 - protein, 120 aa, synthetic construct
  REGION 1..120: note = Description of Artificial Sequence: Synthetic polypeptide
EVQLVESGGGLVQPGGSLRLSCAASGRNLRMYRMGWFRQAPGKEREFVAAVNWNGDSTYYADSVKGRFTISADNSKNTAYLQMNSLKPEDTAVYYCAANWKMLLGVENDWGQGTLVTVSS

SEQ ID NO: 420 - protein, 116 aa, synthetic construct
  REGION 1..116: note = Description of Artificial Sequence: Synthetic polypeptide
EVQLVESGGGLVQPGGSLRLSCAASGFTFDIYAMGWFRQAPGKERELVAGISSSGGSTYYADSVKGRFTISADNSKNTAYLQMNSLKPEDTAVYYCAAVLGTYDYWGQGTLVTVSS

SEQ ID NO: 421 - protein, 118 aa, synthetic construct
  REGION 1..118: note = Description of Artificial Sequence: Synthetic polypeptide
EVQLVESGGGLVQPGGSLRLSCAASGRTFDIYAMGWFRQAPGKERELVAAINRDDSSTYYADSVKGRFTISADNSKNTAYLQMNSLKPEDTAVYYCAAVAGLGNYNYWGQGTLVTVSS

SEQ ID NO: 422 - protein, 116 aa, synthetic construct
  REGION 1..116: note = Description of Artificial Sequence: Synthetic polypeptide
EVQLVESGGGLVQPGGSLRLSCAASGRSFSFNAMGWFRQAPGKERELVAAITKLGFRNYADSVKGRFTISADNSKNTAYLQMNSLKPEDTAVYYCAASIEGVSGRWGQGTLVTVSS

SEQ ID NO: 423 - protein, 123 aa, synthetic construct
  REGION 1..123: note = Description of Artificial Sequence: Synthetic polypeptide
EVQLVESGGGLVQPGGSLRLSCAASGSFFSINAMGWFRQAPGKERELVSASTWNGGYTYYADSVKGRFTISADNSKNTAYLQMNSLKPEDTAVYYCAAHRIVVGGTSVGDWRWGQGTLVTVSS

SEQ ID NO: 424 - protein, 127 aa, synthetic construct
  REGION 1..127: note = Description of Artificial Sequence: Synthetic polypeptide
EVQLVESGGGLVQPGGSLRLSCAASGRTFSDYAMGWFRQAPGKEREFVAGITSSGGYTYYADSVKGRFTISADNSKNTAYLQMNSLKPEDTAVYYCAAVVYYGDWEGSEPVQHEYDWGQGTLVTVSS

SEQ ID NO: 425 - protein, 123 aa, synthetic construct
  REGION 1..123: note = Description of Artificial Sequence: Synthetic polypeptide
EVQLVESGGGLVQPGGSLRLSCAASGSIFSRNAMGWFRQAPGKEREFVAAIRWSGKETWYADSVKGRFTISADNSKNTAYLQMNSLKPEDTAVYYCAKTKRTGIFTTARMVDWGQGTLVTVSS

SEQ ID NO: 426 - protein, 119 aa, synthetic construct
  REGION 1..119: note = Description of Artificial Sequence: Synthetic polypeptide
EVQLVESGGGLVQPGGSLRLSCAASGGTFDTYAMGWFRQAPGKEREFVAGISGDGTITYYADSVKGRFTISADNSKNTAYLQMNSLKPEDTAVYYCATDNPYWSGYNYWGQGTLVTVSS

SEQ ID NO: 427 - protein, 118 aa, synthetic construct
  REGION 1..118: note = Description of Artificial Sequence: Synthetic polypeptide
EVQLVESGGGLVQPGGSLRLSCAASGGTFSNYAMGWFRQAPGKERELVSGINSDGGSTYYADSVKGRFTISADNSKNTAYLQMNSLKPEDTAVYYCAAVSTNDGYDYWGQGTLVTVSS

SEQ ID NO: 428 - protein, 119 aa, synthetic construct
  REGION 1..119: note = Description of Artificial Sequence: Synthetic polypeptide
EVQLVESGGGLVQPGGSLRLSCAASGGIYRVNTMGWFRQAPGKERELVAIKFSGGTTDYADSVKGRFTISADNSKNTAYLQMNSLKPEDTAVYYCAAIAHEEGVYRWDWGQGTLVTVSS

SEQ ID NO: 429 - protein, 117 aa, synthetic construct
  REGION 1..117: note = Description of Artificial Sequence: Synthetic polypeptide
EVQLVESGGGLVQPGGSLRLSCAASGFTFSTYAMGWFRQAPGKERELVAGISSSGSSTYYADSVKGRFTISADNSKNTAYLQMNSLKPEDTAVYYCAVVSDGGYDYWGQGTLVTVSS

SEQ ID NO: 430 - protein, 121 aa, synthetic construct
  REGION 1..121: note = Description of Artificial Sequence: Synthetic polypeptide
EVQLVESGGGLVQPGGSLRLSCAASGRTSSIYNMGWFRQAPGKEREFVAAISRSGRSTSYADSVKGRFTISADNSKNTAYLQMNSLKPEDTAVYYCAAIVTYSDYDLGNDWGQGTLVTVSS

SEQ ID NO: 431 - protein, 117 aa, synthetic construct
  REGION 1..117: note = Description of Artificial Sequence: Synthetic polypeptide
EVQLVESGGGLVQPGGSLRLSCAASGRALSSYSMGWFRQAPGKEREFVALITRSGGTTFYADSVKGRFTISADNSKNTAYLQMNSLKPEDTAVYYCALDNRRSYVDWGQGTLVTVSS

SEQ ID NO: 432 - protein, 124 aa, synthetic construct
  REGION 1..124: note = Description of Artificial Sequence: Synthetic polypeptide
EVQLVESGGGLVQPGGSLRLSCAASGRALSRYGMVWFRQAPGKEREFVAAINRGGKISHYADSVKGRFTISADNSKNTAYLQMNSLKPEDTAVYYCAAGNGGRNYGHSRARYEWGQGTLVTVSS

SEQ ID NO: 433 - protein, 115 aa, synthetic construct
  REGION 1..115: note = Description of Artificial Sequence: Synthetic polypeptide
EVQLVESGGGLVQPGGSLRLSCAASGFKFNDSYMRWFRQAPGKEREFVVAINWSSGSTYYADSVKGRFTISADNSKNTAYLQMNSLKPEDTAVYYCAVVNGPIFWGQGTLVTVSS

SEQ ID NO: 434 - protein, 116 aa, synthetic construct
  REGION 1..116: note = Description of Artificial Sequence: Synthetic polypeptide
EVQLVESGGGLVQPGGSLRLSCAASGRTLSDYALGWFRQAPGKERELVSGINTSGDTTYYADSVKGRFTISADNSKNTAYLQMNSLKPEDTAVYYCAVVTSSYDYWGQGTLVTVSS

SEQ ID NO: 435 - protein, 117 aa, synthetic construct
  REGION 1..117: note = Description of Artificial Sequence: Synthetic polypeptide
EVQLVESGGGLVQPGGSLRLSCAASGSTFDIYGMGWFRQAPGKEREGVAAITGDGSSTSYADSVKGRFTISADNSKNTAYLQMNSLKPEDTAVYYCAADNDTEYGYWGQGTLVTVSS

SEQ ID NO: 436 - protein, 117 aa, synthetic construct
  REGION 1..117: note = Description of Artificial Sequence: Synthetic polypeptide
EVQLVESGGGLVQPGGSLRLSCAASGGTLDIYAMGWFRQAPGKEREFVAAISWSGSTTYYADSVKGRFTISADNSKNTAYLQMNSLKPEDTAVYYCAAVLGYDRDYWGQGTLVTVSS

SEQ ID NO: 437 - protein, 125 aa, synthetic construct
  REGION 1..125: note = Description of Artificial Sequence: Synthetic polypeptide
EVQLVESGGGLVQPGGSLRLSCAASGRPYSYDAMGWFRQAPGKEREIVAAISRTGSSIYYADSVKGRFTISADNSKNTAYLQMNSLKPEDTAVYYCAAQGSLYDDYDGLPIKYDWGQGTLVTVSS

SEQ ID NO: 438 - protein, 122 aa, synthetic construct
  REGION 1..122: note = Description of Artificial Sequence: Synthetic polypeptide
EVQLVESGGGLVQPGGSLRLSCAASGRTFRTYGMGWFRQAPGKEREGVAAISWSGNSTSYADSVKGRFTISADNSKNTAYLQMNSLKPEDTAVYYCAARLSKRGNRSSRDYWGQGTLVTVSS

SEQ ID NO: 439 - protein, 118 aa, synthetic construct
  REGION 1..118: note = Description of Artificial Sequence: Synthetic polypeptide
EVQLVESGGGLVQPGGSLRLSCAASGSTFDNYAMGWFRQAPGKERELVAGINWSDSSTYYADSVKGRFTISADNSKNTAYLQMNSLKPEDTAVYYCAAVAGWGEYDYWGQGTLVTVSS

SEQ ID NO: 440 - protein, 118 aa, synthetic construct
  REGION 1..118: note = Description of Artificial Sequence: Synthetic polypeptide
EVQLVESGGGLVQPGGSLRLSCAASGSTFSIYAMGWFRQAPGKERELVAGINWSDSSTYYADSVKGRFTISADNSKNTAYLQMNSLKPEDTAVYYCAAVTDYDEYNYWGQGTLVTVSS

SEQ ID NO: 441 - protein, 8 aa, synthetic construct
  REGION 1..8: note = Description of Artificial Sequence: Synthetic peptide
GFTFSSYG

SEQ ID NO: 442 - protein, 8 aa, synthetic construct
  REGION 1..8: note = Description of Artificial Sequence: Synthetic peptide
GFTFSDYG

SEQ ID NO: 443 - protein, 8 aa, synthetic construct
  REGION 1..8: note = Description of Artificial Sequence: Synthetic peptide
GFTFSDYG

SEQ ID NO: 444 - protein, 8 aa, synthetic construct
  REGION 1..8: note = Description of Artificial Sequence: Synthetic peptide
GFTFSDYG

SEQ ID NO: 445 - protein, 8 aa, synthetic construct
  REGION 1..8: note = Description of Artificial Sequence: Synthetic peptide
GFTFSDYG

SEQ ID NO: 446 - protein, 8 aa, synthetic construct
  REGION 1..8: note = Description of Artificial Sequence: Synthetic peptide
GFTFSDYG

SEQ ID NO: 447 - protein, 8 aa, synthetic construct
  REGION 1..8: note = Description of Artificial Sequence: Synthetic peptide
GFTFSDYG

SEQ ID NO: 448 - protein, 8 aa, synthetic construct
  REGION 1..8: note = Description of Artificial Sequence: Synthetic peptide
GFTFSDYG

SEQ ID NO: 449 - protein, 8 aa, synthetic construct
  REGION 1..8: note = Description of Artificial Sequence: Synthetic peptide
GFTFSDYG

SEQ ID NO: 450 - protein, 8 aa, synthetic construct
  REGION 1..8: note = Description of Artificial Sequence: Synthetic peptide
GFTFSDYG

SEQ ID NO: 451 - protein, 8 aa, synthetic construct
  REGION 1..8: note = Description of Artificial Sequence: Synthetic peptide
GFTFSDYG

SEQ ID NO: 452 - protein, 8 aa, synthetic construct
  REGION 1..8: note = Description of Artificial Sequence: Synthetic peptide
GFTFSDYG

SEQ ID NO: 453 - protein, 8 aa, synthetic construct
  REGION 1..8: note = Description of Artificial Sequence: Synthetic peptide
GFTFSDYG

SEQ ID NO: 454 - protein, 8 aa, synthetic construct
  REGION 1..8: note = Description of Artificial Sequence: Synthetic peptide
GFTFSDYG

SEQ ID NO: 455 - protein, 8 aa, synthetic construct
  REGION 1..8: note = Description of Artificial Sequence: Synthetic peptide
GFTFSDYG

SEQ ID NO: 456 - protein, 8 aa, synthetic construct
  REGION 1..8: note = Description of Artificial Sequence: Synthetic peptide
GFTFSDYG

SEQ ID NO: 457 - protein, 8 aa, synthetic construct
  REGION 1..8: note = Description of Artificial Sequence: Synthetic peptide
GFTFSDYG

SEQ ID NO: 458 - protein, 8 aa, synthetic construct
  REGION 1..8: note = Description of Artificial Sequence: Synthetic peptide
GFTFSDYG

SEQ ID NO: 459 - protein, 8 aa, synthetic construct
  REGION 1..8: note = Description of Artificial Sequence: Synthetic peptide
GFTFSDYG

SEQ ID NO: 460 - protein, 8 aa, synthetic construct
  REGION 1..8: note = Description of Artificial Sequence: Synthetic peptide
GFTFSDYG

SEQ ID NO: 461 - protein, 8 aa, synthetic construct
  REGION 1..8: note = Description of Artificial Sequence: Synthetic peptide
GFTFSDYG

SEQ ID NO: 462 - protein, 8 aa, synthetic construct
  REGION 1..8: note = Description of Artificial Sequence: Synthetic peptide
GFTFSDYG

SEQ ID NO: 463 - protein, 8 aa, synthetic construct
  REGION 1..8: note = Description of Artificial Sequence: Synthetic peptide
GFTFSDYG

SEQ ID NO: 464 - protein, 8 aa, synthetic construct
  REGION 1..8: note = Description of Artificial Sequence: Synthetic peptide
GFTFSDYG

SEQ ID NO: 465 - protein, 8 aa, synthetic construct
  REGION 1..8: note = Description of Artificial Sequence: Synthetic peptide
GFTFSDYG

SEQ ID NO: 466 - protein, 8 aa, synthetic construct
  REGION 1..8: note = Description of Artificial Sequence: Synthetic peptide
GFTFSDYG

SEQ ID NO: 467 - protein, 8 aa, synthetic construct
  REGION 1..8: note = Description of Artificial Sequence: Synthetic peptide
GFTFSDYG

SEQ ID NO: 468 - protein, 8 aa, synthetic construct
  REGION 1..8: note = Description of Artificial Sequence: Synthetic peptide
GFTFSDYG

SEQ ID NO: 469 - protein, 8 aa, synthetic construct
  REGION 1..8: note = Description of Artificial Sequence: Synthetic peptide
GFTFSDYG

SEQ ID NO: 470 - protein, 8 aa, synthetic construct
  REGION 1..8: note = Description of Artificial Sequence: Synthetic peptide
GFTFSDYG

SEQ ID NO: 471 - protein, 8 aa, synthetic construct
  REGION 1..8: note = Description of Artificial Sequence: Synthetic peptide
GFTFSDYG

SEQ ID NO: 472 - protein, 8 aa, synthetic construct
  REGION 1..8: note = Description of Artificial Sequence: Synthetic peptide
GFTFSDYG

SEQ ID NO: 473 - protein, 8 aa, synthetic construct
  REGION 1..8: note = Description of Artificial Sequence: Synthetic peptide
GFTFSDYG

SEQ ID NO: 474 - protein, 8 aa, synthetic construct
  REGION 1..8: note = Description of Artificial Sequence: Synthetic peptide
GFTFSDYG

SEQ ID NO: 475 - protein, 8 aa, synthetic construct
  REGION 1..8: note = Description of Artificial Sequence: Synthetic peptide
GFTFSDYG

SEQ ID NO: 476 - protein, 8 aa, synthetic construct
  REGION 1..8: note = Description of Artificial Sequence: Synthetic peptide
GFTFSDYG

SEQ ID NO: 477 - protein, 8 aa, synthetic construct
  REGION 1..8: note = Description of Artificial Sequence: Synthetic peptide
GFTFSDYG

SEQ ID NO: 478 - protein, 8 aa, synthetic construct
  REGION 1..8: note = Description of Artificial Sequence: Synthetic peptide
GFTFSDYG

SEQ ID NO: 479 - protein, 8 aa, synthetic construct
  REGION 1..8: note = Description of Artificial Sequence: Synthetic peptide
GFTFSDYG

SEQ ID NO: 480 - protein, 8 aa, synthetic construct
  REGION 1..8: note = Description of Artificial Sequence: Synthetic peptide
GFTFSDYG

SEQ ID NO: 481 - protein, 8 aa, synthetic construct
  REGION 1..8: note = Description of Artificial Sequence: Synthetic peptide
GFTFSDYG

SEQ ID NO: 482 - protein, 8 aa, synthetic construct
  REGION 1..8: note = Description of Artificial Sequence: Synthetic peptide
GFTFSDYG

SEQ ID NO: 483 - protein, 8 aa, synthetic construct
  REGION 1..8: note = Description of Artificial Sequence: Synthetic peptide
GFTFSDYG

SEQ ID NO: 484 - protein, 8 aa, synthetic construct
  REGION 1..8: note = Description of Artificial Sequence: Synthetic peptide
GFTFSDYG

SEQ ID NO: 485 - protein, 8 aa, synthetic construct
  REGION 1..8: note = Description of Artificial Sequence: Synthetic peptide
GFTFSDYG

SEQ ID NO: 486 - protein, 8 aa, synthetic construct
  REGION 1..8: note = Description of Artificial Sequence: Synthetic peptide
GFTFSDYG

SEQ ID NO: 487 - protein, 8 aa, synthetic construct
  REGION 1..8: note = Description of Artificial Sequence: Synthetic peptide
GFTFSDYG

SEQ ID NO: 488 - protein, 8 aa, synthetic construct
  REGION 1..8: note = Description of Artificial Sequence: Synthetic peptide
GFTFSDYG

SEQ ID NO: 489 - protein, 8 aa, synthetic construct
  REGION 1..8: note = Description of Artificial Sequence: Synthetic peptide
GFTFSDYG

SEQ ID NO: 490 - protein, 8 aa, synthetic construct
  REGION 1..8: note = Description of Artificial Sequence: Synthetic peptide
GFTFSDYG

SEQ ID NO: 491 - protein, 8 aa, synthetic construct
  REGION 1..8: note = Description of Artificial Sequence: Synthetic peptide
GFTFSDYG

SEQ ID NO: 492 - protein, 8 aa, synthetic construct
  REGION 1..8: note = Description of Artificial Sequence: Synthetic peptide
GFTFSDYG

SEQ ID NO: 493 - protein, 8 aa, synthetic construct
  REGION 1..8: note = Description of Artificial Sequence: Synthetic peptide
GFTFSDYG

SEQ ID NO: 494 - protein, 8 aa, synthetic construct
  REGION 1..8: note = Description of Artificial Sequence: Synthetic peptide
GFTFSDYG

SEQ ID NO: 495 - protein, 8 aa, synthetic construct
  REGION 1..8: note = Description of Artificial Sequence: Synthetic peptide
GFTFSDYG

SEQ ID NO: 496 - protein, 8 aa, synthetic construct
  REGION 1..8: note = Description of Artificial Sequence: Synthetic peptide
GFTFSDYG

SEQ ID NO: 497 - protein, 8 aa, synthetic construct
  REGION 1..8: note = Description of Artificial Sequence: Synthetic peptide
GFTFSDYG

SEQ ID NO: 498 - protein, 8 aa, synthetic construct
  REGION 1..8: note = Description of Artificial Sequence: Synthetic peptide
GFTFSDYG

SEQ ID NO: 499 - protein, 8 aa, synthetic construct
  REGION 1..8: note = Description of Artificial Sequence: Synthetic peptide
GFTFSDYG

SEQ ID NO: 500 - protein, 8 aa, synthetic construct
  REGION 1..8: note = Description of Artificial Sequence: Synthetic peptide
GFTFSDYG

SEQ ID NO: 501 - protein, 8 aa, synthetic construct
  REGION 1..8: note = Description of Artificial Sequence: Synthetic peptide
GFTFSDYG

SEQ ID NO: 502 - protein, 8 aa, synthetic construct
  REGION 1..8: note = Description of Artificial Sequence: Synthetic peptide
GFTFSDYG

SEQ ID NO: 503 - protein, 8 aa, synthetic construct
  REGION 1..8: note = Description of Artificial Sequence: Synthetic peptide
GFTFSDYG

SEQ ID NO: 504 - protein, 8 aa, synthetic construct
  REGION 1..8: note = Description of Artificial Sequence: Synthetic peptide
GFTFSDYG

SEQ ID NO: 505 - protein, 8 aa, synthetic construct
  REGION 1..8: note = Description of Artificial Sequence: Synthetic peptide
GFTFSDYG

SEQ ID NO: 506 - protein, 8 aa, synthetic construct
  REGION 1..8: note = Description of Artificial Sequence: Synthetic peptide
GFTFSDYG

SEQ ID NO: 507 - protein, 8 aa, synthetic construct
  REGION 1..8: note = Description of Artificial Sequence: Synthetic peptide
GFTFSDYG

SEQ ID NO: 508 - protein, 8 aa, synthetic construct
  REGION 1..8: note = Description of Artificial Sequence: Synthetic peptide
GFTFSDYG

SEQ ID NO: 509 - protein, 8 aa, synthetic construct
  REGION 1..8: note = Description of Artificial Sequence: Synthetic peptide
GFTFSDYG

SEQ ID NO: 510 - protein, 8 aa, synthetic construct
  REGION 1..8: note = Description of Artificial Sequence: Synthetic peptide
GFTFSDYG

SEQ ID NO: 511 - protein, 8 aa, synthetic construct
  REGION 1..8: note = Description of Artificial Sequence: Synthetic peptide
GFTFSDYG

SEQ ID NO: 512 - protein, 8 aa, synthetic construct
  REGION 1..8: note = Description of Artificial Sequence: Synthetic peptide
GFTFSDYG

SEQ ID NO: 513 - protein, 8 aa, synthetic construct
  REGION 1..8: note = Description of Artificial Sequence: Synthetic peptide
GFTFSDYG

SEQ ID NO: 514 - protein, 8 aa, synthetic construct
  REGION 1..8: note = Description of Artificial Sequence: Synthetic peptide
GFTFSDYG

SEQ ID NO: 515 - protein, 8 aa, synthetic construct
  REGION 1..8: note = Description of Artificial Sequence: Synthetic peptide
GFTFSDYG

SEQ ID NO: 516 - protein, 8 aa, synthetic construct
  REGION 1..8: note = Description of Artificial Sequence: Synthetic peptide
GFTFSDYG

SEQ ID NO: 517 - protein, 8 aa, synthetic construct
  REGION 1..8: note = Description of Artificial Sequence: Synthetic peptide
GFTFSDYG

SEQ ID NO: 518 - protein, 8 aa, synthetic construct
  REGION 1..8: note = Description of Artificial Sequence: Synthetic peptide
GFTFSDYG

SEQ ID NO: 519 - protein, 8 aa, synthetic construct
  REGION 1..8: note = Description of Artificial Sequence: Synthetic peptide
GFTFSDYG

SEQ ID NO: 520 - protein, 8 aa, synthetic construct
  REGION 1..8: note = Description of Artificial Sequence: Synthetic peptide
GFTFSDYG

SEQ ID NO: 521 - protein, 8 aa, synthetic construct
  REGION 1..8: note = Description of Artificial Sequence: Synthetic peptide
GFTFSDYG

SEQ ID NO: 522 - protein, 8 aa, synthetic construct
  REGION 1..8: note = Description of Artificial Sequence: Synthetic peptide
GFTFSDYG

SEQ ID NO: 523 - protein, 8 aa, synthetic construct
  REGION 1..8: note = Description of Artificial Sequence: Synthetic peptide
GFTFSDYG

SEQ ID NO: 524 - protein, 8 aa, synthetic construct
  REGION 1..8: note = Description of Artificial Sequence: Synthetic peptide
GFTFSDYG

SEQ ID NO: 525 - protein, 8 aa, synthetic construct
  REGION 1..8: note = Description of Artificial Sequence: Synthetic peptide
GFTFSDYG

SEQ ID NO: 526 - protein, 8 aa, synthetic construct
  REGION 1..8: note = Description of Artificial Sequence: Synthetic peptide
GFTFSDYG

SEQ ID NO: 527 - protein, 8 aa, synthetic construct
  REGION 1..8: note = Description of Artificial Sequence: Synthetic peptide
GFTFSDYG

SEQ ID NO: 528 - protein, 8 aa, synthetic construct
  REGION 1..8: note = Description of Artificial Sequence: Synthetic peptide
GFTFSDYG

SEQ ID NO: 529 - protein, 8 aa, synthetic construct
  REGION 1..8: note = Description of Artificial Sequence: Synthetic peptide
GFTFSDYG

SEQ ID NO: 530 - protein, 8 aa, synthetic construct
  REGION 1..8: note = Description of Artificial Sequence: Synthetic peptide
GFTFSDYG

SEQ ID NO: 531 - protein, 8 aa, synthetic construct
  REGION 1..8: note = Description of Artificial Sequence: Synthetic peptide
GFTFSDYG

SEQ ID NO: 532 - protein, 8 aa, synthetic construct
  REGION 1..8: note = Description of Artificial Sequence: Synthetic peptide
GFTFNNYP

SEQ ID NO: 533 - protein, 8 aa, synthetic construct
  REGION 1..8: note = Description of Artificial Sequence: Synthetic peptide
GFTFNNYA

SEQ ID NO: 534 - protein, 8 aa, synthetic construct
  REGION 1..8: note = Description of Artificial Sequence: Synthetic peptide
GFSFSDYG

SEQ ID NO: 535 - protein, 8 aa, synthetic construct
  REGION 1..8: note = Description of Artificial Sequence: Synthetic peptide
GFAFSNYG

SEQ ID NO: 536 - protein, 8 aa, synthetic construct
  REGION 1..8: note = Description of Artificial Sequence: Synthetic peptide
GFSFSDYG

SEQ ID NO: 537 - protein, 8 aa, synthetic construct
  REGION 1..8: note = Description of Artificial Sequence: Synthetic peptide
GFTFRDYG

SEQ ID NO: 538 - protein, 8 aa, synthetic construct
  REGION 1..8: note = Description of Artificial Sequence: Synthetic peptide
GFTFNNYG

SEQ ID NO: 539 - protein, 8 aa, synthetic construct
  REGION 1..8: note = Description of Artificial Sequence: Synthetic peptide
GFTFSAYS

SEQ ID NO: 540 - protein, 8 aa, synthetic construct
  REGION 1..8: note = Description of Artificial Sequence: Synthetic peptide
GFTFDNYA

SEQ ID NO: 541 - protein, 8 aa, synthetic construct
  REGION 1..8: note = Description of Artificial Sequence: Synthetic peptide
GFPFSSYA

SEQ ID NO: 542 - protein, 8 aa, synthetic construct
  REGION 1..8: note = Description of Artificial Sequence: Synthetic peptide
GFTFRDYA

SEQ ID NO: 543 - protein, 8 aa, synthetic construct
  REGION 1..8: note = Description of Artificial Sequence: Synthetic peptide
GFTFNNYP

SEQ ID NO: 544 - protein, 8 aa, synthetic construct
  REGION 1..8: note = Description of Artificial Sequence: Synthetic peptide
GLTFSNYA

SEQ ID NO: 545 - protein, 8 aa, synthetic construct
  REGION 1..8: note = Description of Artificial Sequence: Synthetic peptide
GFTFGSYA

SEQ ID NO: 546 - protein, 8 aa, synthetic construct
  REGION 1..8: note = Description of Artificial Sequence: Synthetic peptide
GFTFSSYG

SEQ ID NO: 547 - protein, 8 aa, synthetic construct
  REGION 1..8: note = Description of Artificial Sequence: Synthetic peptide
GFNFNNYG

SEQ ID NO: 548 - protein, 8 aa, synthetic construct
  REGION 1..8: note = Description of Artificial Sequence: Synthetic peptide
GFTSSSYA

SEQ ID NO: 549 - protein, 8 aa, synthetic construct
  REGION 1..8: note = Description of Artificial Sequence: Synthetic peptide
GFTFSDYP

SEQ ID NO: 550 - protein, 8 aa, synthetic construct
  REGION 1..8: note = Description of Artificial Sequence: Synthetic peptide
GFTFGNYG

SEQ ID NO: 551 - protein, 8 aa, synthetic construct
  REGION 1..8: note = Description of Artificial Sequence: Synthetic peptide
GFTFNNYA

SEQ ID NO: 552 - protein, 8 aa, synthetic construct
  REGION 1..8: note = Description of Artificial Sequence: Synthetic peptide
GFSFRSYG

SEQ ID NO: 553 - protein, 8 aa, synthetic construct
  REGION 1..8: note = Description of Artificial Sequence: Synthetic peptide
GFSFSNYA

SEQ ID NO: 554 - protein, 8 aa, synthetic construct
  REGION 1..8: note = Description of Artificial Sequence: Synthetic peptide
GFAFSSYA

SEQ ID NO: 555 - protein, 8 aa, synthetic construct
  REGION 1..8: note = Description of Artificial Sequence: Synthetic peptide
GFTFNNYP

SEQ ID NO: 556 - protein, 8 aa, synthetic construct
  REGION 1..8: note = Description of Artificial Sequence: Synthetic peptide
GFTFGNYA

SEQ ID NO: 557 - protein, 8 aa, synthetic construct
  REGION 1..8: note = Description of Artificial Sequence: Synthetic peptide
GFAFSNYG

SEQ ID NO: 558 - protein, 8 aa, synthetic construct
  REGION 1..8: note = Description of Artificial Sequence: Synthetic peptide
GFTFSNYA

SEQ ID NO: 559 - protein, 8 aa, synthetic construct
  REGION 1..8: note = Description of Artificial Sequence: Synthetic peptide
GFSFGSYA

SEQ ID NO: 560 - protein, 8 aa, synthetic construct
  REGION 1..8: note = Description of Artificial Sequence: Synthetic peptide
GFTFSSYP

SEQ ID NO: 561 - protein, 8 aa, synthetic construct
  REGION 1..8: note = Description of Artificial Sequence: Synthetic peptide
GFSFSNYA

SEQ ID NO: 562 - protein, 8 aa, synthetic construct
  REGION 1..8: note = Description of Artificial Sequence: Synthetic peptide
GFSFSSYG

SEQ ID NO: 563 - protein, 8 aa, synthetic construct
  REGION 1..8: note = Description of Artificial Sequence: Synthetic peptide
GFSFSNYA

SEQ ID NO: 564 - protein, 8 aa, synthetic construct
  REGION 1..8: note = Description of Artificial Sequence: Synthetic peptide
GFTFSDYG

SEQ ID NO: 565 - protein, 8 aa, synthetic construct
  REGION 1..8: note = Description of Artificial Sequence: Synthetic peptide
GFTFSDFA

SEQ ID NO: 566 - protein, 8 aa, synthetic construct
  REGION 1..8: note = Description of Artificial Sequence: Synthetic peptide
GFTFSDYP

SEQ ID NO: 567 - protein, 8 aa, synthetic construct
  REGION 1..8: note = Description of Artificial Sequence: Synthetic peptide
GFTFRDYA

SEQ ID NO: 568 - protein, 8 aa, synthetic construct
  REGION 1..8: note = Description of Artificial Sequence: Synthetic peptide
GFTFNRYG

SEQ ID NO: 569 - protein, 8 aa, synthetic construct
  REGION 1..8: note = Description of Artificial Sequence: Synthetic peptide
GFPFSSYG

SEQ ID NO: 570 - protein, 8 aa, synthetic construct
  REGION 1..8: note = Description of Artificial Sequence: Synthetic peptide
GFSFGSYA

SEQ ID NO: 571 - protein, 8 aa, synthetic construct
  REGION 1..8: note = Description of Artificial Sequence: Synthetic peptide
GFTFSNYD

SEQ ID NO: 572 - protein, 8 aa, synthetic construct
  REGION 1..8: note = Description of Artificial Sequence: Synthetic peptide
GFSFRTYG

SEQ ID NO: 573 - protein, 8 aa, synthetic construct
  REGION 1..8: note = Description of Artificial Sequence: Synthetic peptide
GFTFSTYG

SEQ ID NO: 574 - protein, 8 aa, synthetic construct
  REGION 1..8: note = Description of Artificial Sequence: Synthetic peptide
GFSFSDYA

SEQ ID NO: 575 - protein, 8 aa, synthetic construct
  REGION 1..8: note = Description of Artificial Sequence: Synthetic peptide
GFTFSNYA

SEQ ID NO: 576 - protein, 8 aa, synthetic construct
  REGION 1..8: note = Description of Artificial Sequence: Synthetic peptide
GFTFSNYD

SEQ ID NO: 577 - protein, 8 aa, synthetic construct
  REGION 1..8: note = Description of Artificial Sequence: Synthetic peptide
GFSFSNYA

SEQ ID NO: 578 - protein, 8 aa, synthetic construct
  REGION 1..8: note = Description of Artificial Sequence: Synthetic peptide
GFTFSDYP

SEQ ID NO: 579 - protein, 8 aa, synthetic construct
  REGION 1..8: note = Description of Artificial Sequence: Synthetic peptide
GFPFSSYA

SEQ ID NO: 580 - protein, 8 aa, synthetic construct
  REGION 1..8: note = Description of Artificial Sequence: Synthetic peptide
GFAFSSYA

SEQ ID NO: 581 - protein, 8 aa, synthetic construct
  REGION 1..8: note = Description of Artificial Sequence: Synthetic peptide
GFSFSNYA

SEQ ID NO: 582 - protein, 8 aa, synthetic construct
  REGION 1..8: note = Description of Artificial Sequence: Synthetic peptide
GFTFSDYP

SEQ ID NO: 583 - protein, 8 aa, synthetic construct
  REGION 1..8: note = Description of Artificial Sequence: Synthetic peptide
GFSFSNYG

SEQ ID NO: 584 - protein, 8 aa, synthetic construct
  REGION 1..8: note = Description of Artificial Sequence: Synthetic peptide
GFSFRNYG

SEQ ID NO: 585 - protein, 8 aa, synthetic construct
  REGION 1..8: note = Description of Artificial Sequence: Synthetic peptide
GFTFNDYG

SEQ ID NO: 586 - protein, 8 aa, synthetic construct
  REGION 1..8: note = Description of Artificial Sequence: Synthetic peptide
GFTFGNYA

SEQ ID NO: 587 - protein, 8 aa, synthetic construct
  REGION 1..8: note = Description of Artificial Sequence: Synthetic peptide
GFTFTNYG

SEQ ID NO: 588 - protein, 8 aa, synthetic construct
  REGION 1..8: note = Description of Artificial Sequence: Synthetic peptide
GFSFSNYG

SEQ ID NO: 589 - protein, 8 aa, synthetic construct
  REGION 1..8: note = Description of Artificial Sequence: Synthetic peptide
GFTFSDYP

SEQ ID NO: 590 - protein, 8 aa, synthetic construct
  REGION 1..8: note = Description of Artificial Sequence: Synthetic peptide
GFSFSNYA

SEQ ID NO: 591 - protein, 8 aa, synthetic construct
  REGION 1..8: note = Description of Artificial Sequence: Synthetic peptide
GFPFSNYA

SEQ ID NO: 592 - protein, 8 aa, synthetic construct
  REGION 1..8: note = Description of Artificial Sequence: Synthetic peptide
GFSFSDYG

SEQ ID NO: 593 - protein, 8 aa, synthetic construct
  REGION 1..8: note = Description of Artificial Sequence: Synthetic peptide
GFTFGSYG

SEQ ID NO: 594 - protein, 8 aa, synthetic construct
  REGION 1..8: note = Description of Artificial Sequence: Synthetic peptide
GFTFNDYG

SEQ ID NO: 595 - protein, 8 aa, synthetic construct
  REGION 1..8: note = Description of Artificial Sequence: Synthetic peptide
GFTFRDYG

SEQ ID NO: 596 - protein, 8 aa, synthetic construct
  REGION 1..8: note = Description of Artificial Sequence: Synthetic peptide
GFTFGNYG

SEQ ID NO: 597 - protein, 8 aa, synthetic construct
  REGION 1..8: note = Description of Artificial Sequence: Synthetic peptide
GFTFSGYA

SEQ ID NO: 598 - protein, 8 aa, synthetic construct
  REGION 1..8: note = Description of Artificial Sequence: Synthetic peptide
GFTFSNYA

SEQ ID NO: 599 - protein, 8 aa, synthetic construct
  REGION 1..8: note = Description of Artificial Sequence: Synthetic peptide
GFNFNNYG

SEQ ID NO: 600 - protein, 8 aa, synthetic construct
  REGION 1..8: note = Description of Artificial Sequence: Synthetic peptide
GFTFSDYP

SEQ ID NO: 601 - protein, 8 aa, synthetic construct
  REGION 1..8: note = Description of Artificial Sequence: Synthetic peptide
GFTFNNYP

SEQ ID NO: 602 - protein, 8 aa, synthetic construct
  REGION 1..8: note = Description of Artificial Sequence: Synthetic peptide
GFTFSDYA

SEQ ID NO: 603 - protein, 8 aa, synthetic construct
  REGION 1..8: note = Description of Artificial Sequence: Synthetic peptide
GFAFSNYG

SEQ ID NO: 604 - protein, 8 aa, synthetic construct
  REGION 1..8: note = Description of Artificial Sequence: Synthetic peptide
GFTFNRYG

SEQ ID NO: 605 - protein, 8 aa, synthetic construct
  REGION 1..8: note = Description of Artificial Sequence: Synthetic peptide
GFIFSNYA

SEQ ID NO: 606 - protein, 8 aa, synthetic construct
  REGION 1..8: note = Description of Artificial Sequence: Synthetic peptide
GFNFNNYG

SEQ ID NO: 607 - protein, 8 aa, synthetic construct
  REGION 1..8: note = Description of Artificial Sequence: Synthetic peptide
GFTFGSYG

SEQ ID NO: 608 - protein, 8 aa, synthetic construct
  REGION 1..8: note = Description of Artificial Sequence: Synthetic peptide
GFTFGSYA

SEQ ID NO: 609 - protein, 8 aa, synthetic construct
  REGION 1..8: note = Description of Artificial Sequence: Synthetic peptide
GFTFSNYD

SEQ ID NO: 610 - protein, 8 aa, synthetic construct
  REGION 1..8: note = Description of Artificial Sequence: Synthetic peptide
GFTFKNYG

SEQ ID NO: 611 - protein, 8 aa, synthetic construct
  REGION 1..8: note = Description of Artificial Sequence: Synthetic peptide
GFSFSDYA

SEQ ID NO: 612 - protein, 8 aa, synthetic construct
  REGION 1..8: note = Description of Artificial Sequence: Synthetic peptide
GFSFSDYG

SEQ ID NO: 613 - protein, 8 aa, synthetic construct
  REGION 1..8: note = Description of Artificial Sequence: Synthetic peptide
GFTFGSYG

SEQ ID NO: 614 - protein, 8 aa, synthetic construct
  REGION 1..8: note = Description of Artificial Sequence: Synthetic peptide
GFTLSNYA

SEQ ID NO: 615 - protein, 8 aa, synthetic construct
  REGION 1..8: note = Description of Artificial Sequence: Synthetic peptide
GFTFSNFA

SEQ ID NO: 616 - protein, 8 aa, synthetic construct
  REGION 1..8: note = Description of Artificial Sequence: Synthetic peptide
GFTFRNFG

SEQ ID NO: 617 - protein, 8 aa, synthetic construct
  REGION 1..8: note = Description of Artificial Sequence: Synthetic peptide
GFTFGSHG

SEQ ID NO: 618 - protein, 8 aa, synthetic construct
  REGION 1..8: note = Description of Artificial Sequence: Synthetic peptide
GFNFNNYG

SEQ ID NO: 619 - protein, 8 aa, synthetic construct
  REGION 1..8: note = Description of Artificial Sequence: Synthetic peptide
GFTFGSYG

SEQ ID NO: 620 - protein, 8 aa, synthetic construct
  REGION 1..8: note = Description of Artificial Sequence: Synthetic peptide
ISYDESNK

SEQ ID NO: 621 - protein, 8 aa, synthetic construct
  REGION 1..8: note = Description of Artificial Sequence: Synthetic peptide
ISYDRSNE

SEQ ID NO: 622 - protein, 8 aa, synthetic construct
  REGION 1..8: note = Description of Artificial Sequence: Synthetic peptide
ISYDETNK

SEQ ID NO: 623 - protein, 8 aa, synthetic construct
  REGION 1..8: note = Description of Artificial Sequence: Synthetic peptide
ISYDESNK

SEQ ID NO: 624 - protein, 8 aa, synthetic construct
  REGION 1..8: note = Description of Artificial Sequence: Synthetic peptide
ISHDRSNK

SEQ ID NO: 625 - protein, 8 aa, synthetic construct
  REGION 1..8: note = Description of Artificial Sequence: Synthetic peptide
ISYDETNK

SEQ ID NO: 626 - protein, 8 aa, synthetic construct
  REGION 1..8: note = Description of Artificial Sequence: Synthetic peptide
ISYGGSNK

SEQ ID NO: 627 - protein, 8 aa, synthetic construct
  REGION 1..8: note = Description of Artificial Sequence: Synthetic peptide
ISHDRSNK

SEQ ID NO: 628 - protein, 8 aa, synthetic construct
  REGION 1..8: note = Description of Artificial Sequence: Synthetic peptide
ISYDRSNE

SEQ ID NO: 629 - protein, 8 aa, synthetic construct
  REGION 1..8: note = Description of Artificial Sequence: Synthetic peptide
ISSDENNK

SEQ ID NO: 630 - protein, 8 aa, synthetic construct
  REGION 1..8: note = Description of Artificial Sequence: Synthetic peptide
ISDEGSNK

SEQ ID NO: 631 - protein, 8 aa, synthetic construct
  REGION 1..8: note = Description of Artificial Sequence: Synthetic peptide
ISSDENNK

SEQ ID NO: 632 - protein, 8 aa, synthetic construct
  REGION 1..8: note = Description of Artificial Sequence: Synthetic peptide
TSYDESNK

SEQ ID NO: 633 - protein, 8 aa, synthetic construct
  REGION 1..8: note = Description of Artificial Sequence: Synthetic peptide
ISSDASDK

SEQ ID NO: 634 - protein, 8 aa, synthetic construct
  REGION 1..8: note = Description of Artificial Sequence: Synthetic peptide
TSYDESNK

SEQ ID NO: 635 - protein, 8 aa, synthetic construct
  REGION 1..8: note = Description of Artificial Sequence: Synthetic peptide
ISYEGSNK

SEQ ID NO: 636 - protein, 8 aa, synthetic construct
  REGION 1..8: note = Description of Artificial Sequence: Synthetic peptide
ISSDASDK

SEQ ID NO: 637 - protein, 8 aa, synthetic construct
  REGION 1..8: note = Description of Artificial Sequence: Synthetic peptide
ISYDESNE

SEQ ID NO: 638 - protein, 8 aa, synthetic construct
  REGION 1..8: note = Description of Artificial Sequence: Synthetic peptide
ISYDRSNE

SEQ ID NO: 639 - protein, 8 aa, synthetic construct
  REGION 1..8: note = Description of Artificial Sequence: Synthetic peptide
ISDEGSNK

SEQ ID NO: 640 - protein, 8 aa, synthetic construct
  REGION 1..8: note = Description of Artificial Sequence: Synthetic peptide
ISSDENNK

SEQ ID NO: 641 - protein, 8 aa, synthetic construct
  REGION 1..8: note = Description of Artificial Sequence: Synthetic peptide
ISYDASNK

SEQ ID NO: 642 - protein, 8 aa, synthetic construct
  REGION 1..8: note = Description of Artificial Sequence: Synthetic peptide
ISSDASDK

SEQ ID NO: 643 - protein, 8 aa, synthetic construct
  REGION 1..8: note = Description of Artificial Sequence: Synthetic peptide
ISHDRSNK

SEQ ID NO: 644 - protein, 8 aa, synthetic construct
  REGION 1..8: note = Description of Artificial Sequence: Synthetic peptide
ISYDANNK

SEQ ID NO: 645 - protein, 8 aa, synthetic construct
  REGION 1..8: note = Description of Artificial Sequence: Synthetic peptide
ISYEGSNQ

SEQ ID NO: 646 - protein, 8 aa, synthetic construct
  REGION 1..8: note = Description of Artificial Sequence: Synthetic peptide
TSYDESNK

SEQ ID NO: 647 - protein, 8 aa, synthetic construct
  REGION 1..8: note = Description of Artificial Sequence: Synthetic peptide
ISYDATNK

SEQ ID NO: 648 - protein, 8 aa, synthetic construct
  REGION 1..8: note = Description of Artificial Sequence: Synthetic peptide
ISYHGSNK

SEQ ID NO: 649 - protein, 8 aa, synthetic construct
  REGION 1..8: note = Description of Artificial Sequence: Synthetic peptide
ISYDASNK

SEQ ID NO: 650 - protein, 8 aa, synthetic construct
  REGION 1..8: note = Description of Artificial Sequence: Synthetic peptide
ISSDASDK

SEQ ID NO: 651 - protein, 8 aa, synthetic construct
  REGION 1..8: note = Description of Artificial Sequence: Synthetic peptide
TSYDESNK

SEQ ID NO: 652 - protein, 8 aa, synthetic construct
  REGION 1..8: note = Description of Artificial Sequence: Synthetic peptide
ISSDASNK

SEQ ID NO: 653 - protein, 8 aa, synthetic construct
  REGION 1..8: note = Description of Artificial Sequence: Synthetic peptide
ISYDANNK

SEQ ID NO: 654 - protein, 8 aa, synthetic construct
  REGION 1..8: note = Description of Artificial Sequence: Synthetic peptide
ISHDRSNK

SEQ ID NO: 655 - protein, 8 aa, synthetic construct
  REGION 1..8: note = Description of Artificial Sequence: Synthetic peptide
IRYGGSNK

SEQ ID NO: 656 - protein, 8 aa, synthetic construct
  REGION 1..8: note = Description of Artificial Sequence: Synthetic peptide
ISYDATNK

SEQ ID NO: 657 - protein, 8 aa, synthetic construct
  REGION 1..8: note = Description of Artificial Sequence: Synthetic peptide
ISDEGSNK

SEQ ID NO: 658 - protein, 8 aa, synthetic construct
  REGION 1..8: note = Description of Artificial Sequence: Synthetic peptide
ISYEGSNQ

SEQ ID NO: 659 - protein, 8 aa, synthetic construct
  REGION 1..8: note = Description of Artificial Sequence: Synthetic peptide
ISDEGSNK

SEQ ID NO: 660 - protein, 8 aa, synthetic construct
  REGION 1..8: note = Description of Artificial Sequence: Synthetic peptide
ISDEGSNK

SEQ ID NO: 661 - protein, 8 aa, synthetic construct
  REGION 1..8: note = Description of Artificial Sequence: Synthetic peptide
TSYDESNK

SEQ ID NO: 662 - protein, 8 aa, synthetic construct
  REGION 1..8: note = Description of Artificial Sequence: Synthetic peptide
ISSDASHK

SEQ ID NO: 663 - protein, 8 aa, synthetic construct
  REGION 1..8: note = Description of Artificial Sequence: Synthetic peptide
ISYDETNK

SEQ ID NO: 664 - protein, 8 aa, synthetic construct
  REGION 1..8: note = Description of Artificial Sequence: Synthetic peptide
ISDEGSNK

SEQ ID NO: 665 - protein, 8 aa, synthetic construct
  REGION 1..8: note = Description of Artificial Sequence: Synthetic peptide
ISYGGSNK

SEQ ID NO: 666 - protein, 8 aa, synthetic construct
  REGION 1..8: note = Description of Artificial Sequence: Synthetic peptide
ISSDASHK

SEQ ID NO: 667 - protein, 8 aa, synthetic construct
  REGION 1..8: note = Description of Artificial Sequence: Synthetic peptide
ISYDESNK

SEQ ID NO: 668 - protein, 8 aa, synthetic construct
  REGION 1..8: note = Description of Artificial Sequence: Synthetic peptide
ISSDASDK

SEQ ID NO: 669 - protein, 8 aa, synthetic construct
  REGION 1..8: note = Description of Artificial Sequence: Synthetic peptide
ISYGGSNK

SEQ ID NO: 670 - protein, 8 aa, synthetic construct
  REGION 1..8: note = Description of Artificial Sequence: Synthetic peptide
TSYDESNK

SEQ ID NO: 671 - protein, 8 aa, synthetic construct
  REGION 1..8: note = Description of Artificial Sequence: Synthetic peptide
ISHDRSNK

SEQ ID NO: 672 - protein, 8 aa, synthetic construct
  REGION 1..8: note = Description of Artificial Sequence: Synthetic peptide
ISHDRSNK

SEQ ID NO: 673 - protein, 8 aa, synthetic construct
  REGION 1..8: note = Description of Artificial Sequence: Synthetic peptide
ISSDASDK

SEQ ID NO: 674 - protein, 8 aa, synthetic construct
  REGION 1..8: note = Description of Artificial Sequence: Synthetic peptide
ISHDRSNK

SEQ ID NO: 675 - protein, 8 aa, synthetic construct
  REGION 1..8: note = Description of Artificial Sequence: Synthetic peptide
ISSDASDK

SEQ ID NO: 676 - protein, 8 aa, synthetic construct
  REGION 1..8: note = Description of Artificial Sequence: Synthetic peptide
ISSDASDK

SEQ ID NO: 677 - protein, 8 aa, synthetic construct
  REGION 1..8: note = Description of Artificial Sequence: Synthetic peptide
ISYDATNK

SEQ ID NO: 678 - protein, 8 aa, synthetic construct
  REGION 1..8: note = Description of Artificial Sequence: Synthetic peptide
ISSDASHK

SEQ ID NO: 679 - protein, 8 aa, synthetic construct
  REGION 1..8: note = Description of Artificial Sequence: Synthetic peptide
ISSDASDK

SEQ ID NO: 680 - protein, 8 aa, synthetic construct
  REGION 1..8: note = Description of Artificial Sequence: Synthetic peptide
ISSDASDK

SEQ ID NO: 681 - protein, 8 aa, synthetic construct
  REGION 1..8: note = Description of Artificial Sequence: Synthetic peptide
ISYDAGNK

SEQ ID NO: 682 - protein, 8 aa, synthetic construct
  REGION 1..8: note = Description of Artificial Sequence: Synthetic peptide
TSYEESNK

SEQ ID NO: 683 - protein, 8 aa, synthetic construct
  REGION 1..8: note = Description of Artificial Sequence: Synthetic peptide
ISHDRSNK

SEQ ID NO: 684 - protein, 8 aa, synthetic construct
  REGION 1..8: note = Description of Artificial Sequence: Synthetic peptide
ISSDASDK

SEQ ID NO: 685 - protein, 8 aa, synthetic construct
  REGION 1..8: note = Description of Artificial Sequence: Synthetic peptide
ISSDENNK

SEQ ID NO: 686 - protein, 8 aa, synthetic construct
  REGION 1..8: note = Description of Artificial Sequence: Synthetic peptide
ISYGGSNK

SEQ ID NO: 687 - protein, 8 aa, synthetic construct
  REGION 1..8: note = Description of Artificial Sequence: Synthetic peptide
ISSDASNK

SEQ ID NO: 688 - protein, 8 aa, synthetic construct
  REGION 1..8: note = Description of Artificial Sequence: Synthetic peptide
IRYDESNK

SEQ ID NO: 689 - protein, 8 aa, synthetic construct
  REGION 1..8: note = Description of Artificial Sequence: Synthetic peptide
ISSDASNK

SEQ ID NO: 690 - protein, 8 aa, synthetic construct
  REGION 1..8: note = Description of Artificial Sequence: Synthetic peptide
ISSDASDK

SEQ ID NO: 691 - protein, 8 aa, synthetic construct
  REGION 1..8: note = Description of Artificial Sequence: Synthetic peptide
ISDEGSNK

SEQ ID NO: 692 - protein, 8 aa, synthetic construct
  REGION 1..8: note = Description of Artificial Sequence: Synthetic peptide
ISHDRSNK

SEQ ID NO: 693 - protein, 8 aa, synthetic construct
  REGION 1..8: note = Description of Artificial Sequence: Synthetic peptide
ISYDETNK

SEQ ID NO: 694 - protein, 8 aa, synthetic construct
  REGION 1..8: note = Description of Artificial Sequence: Synthetic peptide
ISYDESNK

SEQ ID NO: 695 - protein, 8 aa, synthetic construct
  REGION 1..8: note = Description of Artificial Sequence: Synthetic peptide
ISDEGSNK

SEQ ID NO: 696 - protein, 8 aa, synthetic construct
  REGION 1..8: note = Description of Artificial Sequence: Synthetic peptide
ISYDESNK

SEQ ID NO: 697 - protein, 8 aa, synthetic construct
  REGION 1..8: note = Description of Artificial Sequence: Synthetic peptide
ISYDAGNK

SEQ ID NO: 698 - protein, 8 aa, synthetic construct
  REGION 1..8: note = Description of Artificial Sequence: Synthetic peptide
ISDEGSNK

SEQ ID NO: 699 - protein, 8 aa, synthetic construct
  REGION 1..8: note = Description of Artificial Sequence: Synthetic peptide
ISYDENNK

SEQ ID NO: 700 - protein, 8 aa, synthetic construct
  REGION 1..8: note = Description of Artificial Sequence: Synthetic peptide
TSYDESNK

SEQ ID NO: 701 - protein, 8 aa, synthetic construct
  REGION 1..8: note = Description of Artificial Sequence: Synthetic peptide
ISYDAGNK

SEQ ID NO: 702 - protein, 8 aa, synthetic construct
  REGION 1..8: note = Description of Artificial Sequence: Synthetic peptide
ISNDENNK

SEQ ID NO: 703 - protein, 8 aa, synthetic construct
  REGION 1..8: note = Description of Artificial Sequence: Synthetic peptide
TSYDESNK

SEQ ID NO: 704 - protein, 8 aa, synthetic construct
  REGION 1..8: note = Description of Artificial Sequence: Synthetic peptide
ISDEGSNK

SEQ ID NO: 705 - protein, 8 aa, synthetic construct
  REGION 1..8: note = Description of Artificial Sequence: Synthetic peptide
ISYDATNK

SEQ ID NO: 706 - protein, 8 aa, synthetic construct
  REGION 1..8: note = Description of Artificial Sequence: Synthetic peptide
ISDEGSNK

SEQ ID NO: 707 - protein, 8 aa, synthetic construct
  REGION 1..8: note = Description of Artificial Sequence: Synthetic peptide
ISSDASNK

SEQ ID NO: 708 - protein, 8 aa, synthetic construct
  REGION 1..8: note = Description of Artificial Sequence: Synthetic peptide
ISDEGSNK

SEQ ID NO: 709 - protein, 8 aa, synthetic construct
  REGION 1..8: note = Description of Artificial Sequence: Synthetic peptide
ISSDASDK

SEQ ID NO: 710 - protein, 8 aa, synthetic construct
  REGION 1..8: note = Description of Artificial Sequence: Synthetic peptide
ISSDASDK

SEQ ID NO: 711 - protein, 8 aa, synthetic construct
  REGION 1..8: note = Description of Artificial Sequence: Synthetic peptide
ISYDESNK

SEQ ID NO: 712 - protein, 8 aa, synthetic construct
  REGION 1..8: note = Description of Artificial Sequence: Synthetic peptide
ISDEGSNK

SEQ ID NO: 713 - protein, 8 aa, synthetic construct
  REGION 1..8: note = Description of Artificial Sequence: Synthetic peptide
ISYDANNK

SEQ ID NO: 714 - protein, 8 aa, synthetic construct
  REGION 1..8: note = Description of Artificial Sequence: Synthetic peptide
ISYDESNK

SEQ ID NO: 715 - protein, 8 aa, synthetic construct
  REGION 1..8: note = Description of Artificial Sequence: Synthetic peptide
ISYEGSNK

SEQ ID NO: 716 - protein, 8 aa, synthetic construct
  REGION 1..8: note = Description of Artificial Sequence: Synthetic peptide
IRYDEINK

SEQ ID NO: 717 - protein, 8 aa, synthetic construct
  REGION 1..8: note = Description of Artificial Sequence: Synthetic peptide
ISDEGSNK

SEQ ID NO: 718 - protein, 8 aa, synthetic construct
  REGION 1..8: note = Description of Artificial Sequence: Synthetic peptide
ISYDATNK

SEQ ID NO: 719 - protein, 8 aa, synthetic construct
  REGION 1..8: note = Description of Artificial Sequence: Synthetic peptide
ISYDAGNK

SEQ ID NO: 720 - protein, 8 aa, synthetic construct
  REGION 1..8: note = Description of Artificial Sequence: Synthetic peptide
ISYDRSNK

SEQ ID NO: 721 - protein, 8 aa, synthetic construct
  REGION 1..8: note = Description of Artificial Sequence: Synthetic peptide
ISFDESNK

SEQ ID NO: 722 - protein, 8 aa, synthetic construct
  REGION 1..8: note = Description of Artificial Sequence: Synthetic peptide
ISHDRSNK

SEQ ID NO: 723 - protein, 8 aa, synthetic construct
  REGION 1..8: note = Description of Artificial Sequence: Synthetic peptide
TSYDESNK

SEQ ID NO: 724 - protein, 8 aa, synthetic construct
  REGION 1..8: note = Description of Artificial Sequence: Synthetic peptide
TSYDESNK

SEQ ID NO: 725 - protein, 8 aa, synthetic construct
  REGION 1..8: note = Description of Artificial Sequence: Synthetic peptide
ISSDASDK

SEQ ID NO: 726 - protein, 8 aa, synthetic construct
  REGION 1..8: note = Description of Artificial Sequence: Synthetic peptide
ISYDASNK

SEQ ID NO: 727 - protein, 8 aa, synthetic construct
  REGION 1..8: note = Description of Artificial Sequence: Synthetic peptide
ISDEGSNK

SEQ ID NO: 728 - protein, 8 aa, synthetic construct
  REGION 1..8: note = Description of Artificial Sequence: Synthetic peptide
ISYDESNK

SEQ ID NO: 729 - protein, 8 aa, synthetic construct
  REGION 1..8: note = Description of Artificial Sequence: Synthetic peptide
ISYDASNK

SEQ ID NO: 730 - protein, 8 aa, synthetic construct
  REGION 1..8: note = Description of Artificial Sequence: Synthetic peptide
ISYAGSNE

SEQ ID NO: 731 - protein, 8 aa, synthetic construct
  REGION 1..8: note = Description of Artificial Sequence: Synthetic peptide
ISSDASNK

SEQ ID NO: 732 - protein, 8 aa, synthetic construct
  REGION 1..8: note = Description of Artificial Sequence: Synthetic peptide
TSYDESNK

SEQ ID NO: 733 - protein, 8 aa, synthetic construct
  REGION 1..8: note = Description of Artificial Sequence: Synthetic peptide
ISYDENNK

SEQ ID NO: 734 - protein, 8 aa, synthetic construct
  REGION 1..8: note = Description of Artificial Sequence: Synthetic peptide
IWSDASQK

SEQ ID NO: 735 - protein, 8 aa, synthetic construct
  REGION 1..8: note = Description of Artificial Sequence: Synthetic peptide
ISSDASDK

SEQ ID NO: 736 - protein, 8 aa, synthetic construct
  REGION 1..8: note = Description of Artificial Sequence: Synthetic peptide
ISYDASNK

SEQ ID NO: 737 - protein, 8 aa, synthetic construct
  REGION 1..8: note = Description of Artificial Sequence: Synthetic peptide
ISYDASNK

SEQ ID NO: 738 - protein, 8 aa, synthetic construct
  REGION 1..8: note = Description of Artificial Sequence: Synthetic peptide
TSYDESNK

SEQ ID NO: 739 - protein, 8 aa, synthetic construct
  REGION 1..8: note = Description of Artificial Sequence: Synthetic peptide
ISYEGTNK

SEQ ID NO: 740 - protein, 8 aa, synthetic construct
  REGION 1..8: note = Description of Artificial Sequence: Synthetic peptide
ISYDESNE

SEQ ID NO: 741 - protein, 8 aa, synthetic construct
  REGION 1..8: note = Description of Artificial Sequence: Synthetic peptide
ISYGGSNK

SEQ ID NO: 742 - protein, 8 aa, synthetic construct
  REGION 1..8: note = Description of Artificial Sequence: Synthetic peptide
TSYDESNK

SEQ ID NO: 743 - protein, 8 aa, synthetic construct
  REGION 1..8: note = Description of Artificial Sequence: Synthetic peptide
ISYDESNK

SEQ ID NO: 744 - protein, 8 aa, synthetic construct
  REGION 1..8: note = Description of Artificial Sequence: Synthetic peptide
ISYEGSNK

SEQ ID NO: 745 - protein, 8 aa, synthetic construct
  REGION 1..8: note = Description of Artificial Sequence: Synthetic peptide
ISDEGSNK

SEQ ID NO: 746 - protein, 8 aa, synthetic construct
  REGION 1..8: note = Description of Artificial Sequence: Synthetic peptide
ISYDATNK

SEQ ID NO: 747 - protein, 8 aa, synthetic construct
  REGION 1..8: note = Description of Artificial Sequence: Synthetic peptide
ISYDASNK

SEQ ID NO: 748 - protein, 8 aa, synthetic construct
  REGION 1..8: note = Description of Artificial Sequence: Synthetic peptide
ISYDATNK

SEQ ID NO: 749 - protein, 8 aa, synthetic construct
  REGION 1..8: note = Description of Artificial Sequence: Synthetic peptide
ISYDASNK

SEQ ID NO: 750 - protein, 8 aa, synthetic construct
  REGION 1..8: note = Description of Artificial Sequence: Synthetic peptide
ISYAGSNK

SEQ ID NO: 751 - protein, 8 aa, synthetic construct
  REGION 1..8: note = Description of Artificial Sequence: Synthetic peptide
ISDEGSNK

SEQ ID NO: 752 - protein, 8 aa, synthetic construct
  REGION 1..8: note = Description of Artificial Sequence: Synthetic peptide
ISYDANNK

SEQ ID NO: 753 - protein, 8 aa, synthetic construct
  REGION 1..8: note = Description of Artificial Sequence: Synthetic peptide
ISSDASNK

SEQ ID NO: 754 - protein, 8 aa, synthetic construct
  REGION 1..8: note = Description of Artificial Sequence: Synthetic peptide
ISYDATNK

SEQ ID NO: 755 - protein, 8 aa, synthetic construct
  REGION 1..8: note = Description of Artificial Sequence: Synthetic peptide
TSYDESKK

SEQ ID NO: 756 - protein, 8 aa, synthetic construct
  REGION 1..8: note = Description of Artificial Sequence: Synthetic peptide
TSYDESNK

SEQ ID NO: 757 - protein, 8 aa, synthetic construct
  REGION 1..8: note = Description of Artificial Sequence: Synthetic peptide
ISYAGSNE

SEQ ID NO: 758 - protein, 8 aa, synthetic construct
  REGION 1..8: note = Description of Artificial Sequence: Synthetic peptide
ISYDANNK

SEQ ID NO: 759 - protein, 8 aa, synthetic construct
  REGION 1..8: note = Description of Artificial Sequence: Synthetic peptide
ISYDESNK

SEQ ID NO: 760 - protein, 8 aa, synthetic construct
  REGION 1..8: note = Description of Artificial Sequence: Synthetic peptide
ISFDESNK

SEQ ID NO: 761 - protein, 8 aa, synthetic construct
  REGION 1..8: note = Description of Artificial Sequence: Synthetic peptide
ISYDRSNE

SEQ ID NO: 762 - protein, 8 aa, synthetic construct
  REGION 1..8: note = Description of Artificial Sequence: Synthetic peptide
ISSDASNK

SEQ ID NO: 763 - protein, 8 aa, synthetic construct
  REGION 1..8: note = Description of Artificial Sequence: Synthetic peptide
ISYDESNK

SEQ ID NO: 764 - protein, 8 aa, synthetic construct
  REGION 1..8: note = Description of Artificial Sequence: Synthetic peptide
ISSDASNK

SEQ ID NO: 765 - protein, 8 aa, synthetic construct
  REGION 1..8: note = Description of Artificial Sequence: Synthetic peptide
ISSDASNK

SEQ ID NO: 766 - protein, 8 aa, synthetic construct
  REGION 1..8: note = Description of Artificial Sequence: Synthetic peptide
ISSDASDK

SEQ ID NO: 767 - protein, 8 aa, synthetic construct
  REGION 1..8: note = Description of Artificial Sequence: Synthetic peptide
ISYGGSNK

SEQ ID NO: 768 - protein, 8 aa, synthetic construct
  REGION 1..8: note = Description of Artificial Sequence: Synthetic peptide
ISSDASDK

SEQ ID NO: 769 - protein, 8 aa, synthetic construct
  REGION 1..8: note = Description of Artificial Sequence: Synthetic peptide
ISYDASNK

SEQ ID NO: 770 - protein, 8 aa, synthetic construct
  REGION 1..8: note = Description of Artificial Sequence: Synthetic peptide
ISSDASNK

SEQ ID NO: 771 - protein, 8 aa, synthetic construct
  REGION 1..8: note = Description of Artificial Sequence: Synthetic peptide
ISYDANNK

SEQ ID NO: 772 - protein, 8 aa, synthetic construct
  REGION 1..8: note = Description of Artificial Sequence: Synthetic peptide
ISDEGSNK

SEQ ID NO: 773 - protein, 8 aa, synthetic construct
  REGION 1..8: note = Description of Artificial Sequence: Synthetic peptide
ISSDENNK

SEQ ID NO: 774 - protein, 8 aa, synthetic construct
  REGION 1..8: note = Description of Artificial Sequence: Synthetic peptide
ISSDENNK

SEQ ID NO: 775 - protein, 8 aa, synthetic construct
  REGION 1..8: note = Description of Artificial Sequence: Synthetic peptide
ISSDASHK

SEQ ID NO: 776 - protein, 8 aa, synthetic construct
  REGION 1..8: note = Description of Artificial Sequence: Synthetic peptide
ISSDENNK

SEQ ID NO: 777 - protein, 8 aa, synthetic construct
  REGION 1..8: note = Description of Artificial Sequence: Synthetic peptide
ISDEGSNK

SEQ ID NO: 778 - protein, 8 aa, synthetic construct
  REGION 1..8: note = Description of Artificial Sequence: Synthetic peptide
ISYDESNK

SEQ ID NO: 779 - protein, 8 aa, synthetic construct
  REGION 1..8: note = Description of Artificial Sequence: Synthetic peptide
ISSDASDK

SEQ ID NO: 780 - protein, 8 aa, synthetic construct
  REGION 1..8: note = Description of Artificial Sequence: Synthetic peptide
ISYGGSDK

SEQ ID NO: 781 - protein, 8 aa, synthetic construct
  REGION 1..8: note = Description of Artificial Sequence: Synthetic peptide
IPYDESNK

SEQ ID NO: 782 - protein, 8 aa, synthetic construct
  REGION 1..8: note = Description of Artificial Sequence: Synthetic peptide
ISDEGSNK

SEQ ID NO: 783 - protein, 8 aa, synthetic construct
  REGION 1..8: note = Description of Artificial Sequence: Synthetic peptide
ISDEGSNK

SEQ ID NO: 784 - protein, 8 aa, synthetic construct
  REGION 1..8: note = Description of Artificial Sequence: Synthetic peptide
ISYDASNK

SEQ ID NO: 785 - protein, 8 aa, synthetic construct
  REGION 1..8: note = Description of Artificial Sequence: Synthetic peptide
ISSDASNK

SEQ ID NO: 786 - protein, 8 aa, synthetic construct
  REGION 1..8: note = Description of Artificial Sequence: Synthetic peptide
ISSDENNK

SEQ ID NO: 787 - protein, 8 aa, synthetic construct
  REGION 1..8: note = Description of Artificial Sequence: Synthetic peptide
TSYDESNK

SEQ ID NO: 788 - protein, 8 aa, synthetic construct
  REGION 1..8: note = Description of Artificial Sequence: Synthetic peptide
ISDEGSNK

SEQ ID NO: 789 - protein, 8 aa, synthetic construct
  REGION 1..8: note = Description of Artificial Sequence: Synthetic peptide
ISYGGSNK

SEQ ID NO: 790 - protein, 8 aa, synthetic construct
  REGION 1..8: note = Description of Artificial Sequence: Synthetic peptide
ISDDGSNK

SEQ ID NO: 791 - protein, 8 aa, synthetic construct
  REGION 1..8: note = Description of Artificial Sequence: Synthetic peptide
ISSDASDK

SEQ ID NO: 792 - protein, 8 aa, synthetic construct
  REGION 1..8: note = Description of Artificial Sequence: Synthetic peptide
ISSDENNK

SEQ ID NO: 793 - protein, 8 aa, synthetic construct
  REGION 1..8: note = Description of Artificial Sequence: Synthetic peptide
IPYDESNK

SEQ ID NO: 794 - protein, 8 aa, synthetic construct
  REGION 1..8: note = Description of Artificial Sequence: Synthetic peptide
ISSDASNK

SEQ ID NO: 795 - protein, 8 aa, synthetic construct
  REGION 1..8: note = Description of Artificial Sequence: Synthetic peptide
ISSDASNK

SEQ ID NO: 796 - protein, 8 aa, synthetic construct
  REGION 1..8: note = Description of Artificial Sequence: Synthetic peptide
ISSDENNK

SEQ ID NO: 797 - protein, 8 aa, synthetic construct
  REGION 1..8: note = Description of Artificial Sequence: Synthetic peptide
ISDEGSNK

SEQ ID NO: 798 - protein, 8 aa, synthetic construct
  REGION 1..8: note = Description of Artificial Sequence: Synthetic peptide
ISYDASNK

SEQ ID NO: 799 - protein, 41 aa, synthetic construct
  REGION 1..41: note = Description of Artificial Sequence: Synthetic polypeptide
AKHMSMQEGAVTGEGQAAKEFIAWLVKGRVRADLVGDAFDV

SEQ ID NO: 800 - protein, 41 aa, synthetic construct
  REGION 1..41: note = Description of Artificial Sequence: Synthetic polypeptide
AKHMSMQEGAVTGDGQAAKEFIAWLVKGRVRADLVGDAFDV

SEQ ID NO: 801 - protein, 41 aa, synthetic construct
  REGION 1..41: note = Description of Artificial Sequence: Synthetic polypeptide
AKHMSMQEGAVTGEGQAAKEFIAWLVKGIVRADLVGDAFDV

SEQ ID NO: 802 - protein, 41 aa, synthetic construct
  REGION 1..41: note = Description of Artificial Sequence: Synthetic polypeptide
AKHMSMQEGAVTGEYQAAKEFIAWLVKGRVRADLVGDAFDV

SEQ ID NO: 803 - protein, 41 aa, synthetic construct
  REGION 1..41: note = Description of Artificial Sequence: Synthetic polypeptide
AKHMSMQEGAVTGEGQAAKDFIAWLVKGRVRADLVGDAFDV

SEQ ID NO: 804 - protein, 41 aa, synthetic construct; identical to SEQ ID NO: 801
  REGION 1..41: note = Description of Artificial Sequence: Synthetic polypeptide

SEQ ID NO: 805 - protein, 41 aa, synthetic construct
  REGION 1..41: note = Description of Artificial Sequence: Synthetic polypeptide
AKHMSMQEGAVTGEGQAVKEFIAWLVKGRVRADLVGDAFDV

SEQ ID NO: 806 - protein, 41 aa, synthetic construct; identical to SEQ ID NO: 805
  REGION 1..41: note = Description of Artificial Sequence: Synthetic polypeptide

SEQ ID NO: 807 - protein, 41 aa, synthetic construct
  REGION 1..41: note = Description of Artificial Sequence: Synthetic polypeptide
AKHMSMQEGAVTGEGQAIKEFIAWLVKGRVRADLVGDAFDV

SEQ ID NO: 808 - protein, 41 aa, synthetic construct
  REGION 1..41: note = Description of Artificial Sequence: Synthetic polypeptide
AKHMSMQEGAVTGEMQAAKEFIAWLVKGRVRADLVGDAFDV

SEQ ID NO: 809 - protein, 41 aa, synthetic construct
  REGION 1..41: note = Description of Artificial Sequence: Synthetic polypeptide
AKHMSMQEGAVTGAGQAAKEFIAWLVKGRVRADLVGDAFDV

SEQ ID NO: 810 - protein, 41 aa, synthetic construct
  REGION 1..41: note = Description of Artificial Sequence: Synthetic polypeptide
AKHMSMQEGAVTGEFQAAKEFIAWLVKGRVRADLVGDAFDV

SEQ ID NO: 811 - protein, 41 aa, synthetic construct; identical to SEQ ID NO: 802
  REGION 1..41: note = Description of Artificial Sequence: Synthetic polypeptide

SEQ ID NO: 812 - protein, 41 aa, synthetic construct; identical to SEQ ID NO: 802
  REGION 1..41: note = Description of Artificial Sequence: Synthetic polypeptide

SEQ ID NO: 813 - protein, 41 aa, synthetic construct
  REGION 1..41: note = Description of Artificial Sequence: Synthetic polypeptide
AKHMSMQEGAVTGVGQAAKEFIAWLVKGRVRADLVGDAFDV

SEQ ID NO: 814 - protein, 41 aa, synthetic construct
  REGION 1..41: note = Description of Artificial Sequence: Synthetic polypeptide
AKHMSMQEGAVTGMGQAAKEFIAWLIKGRVRADLVGDAFDV

SEQ ID NO: 815 - protein, 41 aa, synthetic construct
  REGION 1..41: note = Description of Artificial Sequence: Synthetic polypeptide
AKHMSMQEGAVTGMGQAAKEFIAWLVKGRVRADLVGDAFDV

SEQ ID NO: 816 - protein, 41 aa, synthetic construct
  REGION 1..41: note = Description of Artificial Sequence: Synthetic polypeptide
AKHMSMQEGAVTGEHQAAKEFIAWLVKGRVRADLVGDAFDV

SEQ ID NO: 817 - protein, 41 aa, synthetic construct
  REGION 1..41: note = Description of Artificial Sequence: Synthetic polypeptide
AKHMSMQEGAVHGEGQAAKEFIAWLVKGRVRADLVGDAFDV

SEQ ID NO: 818 - protein, 41 aa, synthetic construct
  REGION 1..41: note = Description of Artificial Sequence: Synthetic polypeptide
AKHMSMQEGAVTGEWQAAKEFIAWLVKGRVRADLVGDAFDV

SEQ ID NO: 819 - protein, 41 aa, synthetic construct; identical to SEQ ID NO: 810
  REGION 1..41: note = Description of Artificial Sequence: Synthetic polypeptide

SEQ ID NO: 820 - protein, 41 aa, synthetic construct; identical to SEQ ID NO: 805
  REGION 1..41: note = Description of Artificial Sequence: Synthetic polypeptide

SEQ ID NO: 821 - protein, 41 aa, synthetic construct; identical to SEQ ID NO: 818
  REGION 1..41: note = Description of Artificial Sequence: Synthetic polypeptide

SEQ ID NO: 822 - protein, 41 aa, synthetic construct
  REGION 1..41: note = Description of Artificial Sequence: Synthetic polypeptide
AKHMSMQEGAVTGLGQAAKEFIAWLVKGRVRADLVGDAFDV

SEQ ID NO: 823 - protein, 41 aa, synthetic construct
  REGION 1..41: note = Description of Artificial Sequence: Synthetic polypeptide
AKHMSMQEGAVTGEGQAAKEFIAWLIKGRVRADLVGDAFDV

SEQ ID NO: 824 - protein, 41 aa, synthetic construct
  REGION 1..41: note = Description of Artificial Sequence: Synthetic polypeptide
AKHMSMQEGAVTGIGQAAKEFIAWLVKGRVRADLVGDAFDV

SEQ ID NO: 825 - protein, 41 aa, synthetic construct
  REGION 1..41: note = Description of Artificial Sequence: Synthetic polypeptide
AKHMSMQEGAVTGFGQAAKEFIAWLVKGRVRADLVGDAFDV

SEQ ID NO: 826 - protein, 41 aa, synthetic construct; identical to SEQ ID NO: 815
  REGION 1..41: note = Description of Artificial Sequence: Synthetic polypeptide

SEQ ID NO: 827 - protein, 41 aa, synthetic construct; identical to SEQ ID NO: 815
  REGION 1..41: note = Description of Artificial Sequence: Synthetic polypeptide

SEQ ID NO: 828 - protein, 41 aa, synthetic construct
  REGION 1..41: note = Description of Artificial Sequence: Synthetic polypeptide
AKHMSMQEGAVTGYGQAAKEFIAWLVKGRVRADLVGDAFDV

SEQ ID NO: 829 - protein, 41 aa, synthetic construct; identical to SEQ ID NO: 810
  REGION 1..41: note = Description of Artificial Sequence: Synthetic polypeptide

SEQ ID NO: 830 - protein, 41 aa, synthetic construct
  REGION 1..41: note = Description of Artificial Sequence: Synthetic polypeptide
AKHMSMQEGAVTGGGQAAKEFIAWLVKGRVRADLVGDAFDV

SEQ ID NO: 831 - protein, 41 aa, synthetic construct; identical to SEQ ID NO: 805
  REGION 1..41: note = Description of Artificial Sequence: Synthetic polypeptide

SEQ ID NO: 832 - protein, 41 aa, synthetic construct; identical to SEQ ID NO: 818
  REGION 1..41: note = Description of Artificial Sequence: Synthetic polypeptide

SEQ ID NO: 833 - protein, 41 aa, synthetic construct
  REGION 1..41: note = Description of Artificial Sequence: Synthetic polypeptide
AKHMSMQEGAVTGPGQAAKEFIAWLVKGRVRADLVGDAFDV

SEQ ID NO: 834 - protein, 41 aa, synthetic construct; identical to SEQ ID NO: 799
  REGION 1..41: note = Description of Artificial Sequence: Synthetic polypeptide

SEQ ID NO: 835 - protein, 41 aa, synthetic construct; identical to SEQ ID NO: 828
  REGION 1..41: note = Description of Artificial Sequence: Synthetic polypeptide

SEQ ID NO: 836 - protein, 41 aa, synthetic construct; identical to SEQ ID NO: 815
  REGION 1..41: note = Description of Artificial Sequence: Synthetic polypeptide

SEQ ID NO: 837 - protein, 41 aa, synthetic construct
  REGION 1..41: note = Description of Artificial Sequence: Synthetic polypeptide
AKHMSMQEGAVTGWGQAAKEFIAWLVKGRVRADLVGDAFDV

SEQ ID NO: 838 - protein, 41 aa, synthetic construct; identical to SEQ ID NO: 822
  REGION 1..41: note = Description of Artificial Sequence: Synthetic polypeptide

SEQ ID NO: 839 - protein, 41 aa, synthetic construct; identical to SEQ ID NO: 818
  REGION 1..41: note = Description of Artificial Sequence: Synthetic polypeptide

SEQ ID NO: 840 - protein, 41 aa, synthetic construct; identical to SEQ ID NO: 818
  REGION 1..41: note = Description of Artificial Sequence: Synthetic polypeptide

SEQ ID NO: 841 - protein, 41 aa, synthetic construct
  REGION 1..41: note = Description of Artificial Sequence: Synthetic polypeptide
AKHMSMQEGAVTWEGQAAKEFIAWLVKGRVRADLVGDAFDV

SEQ ID NO: 842 - protein, 41 aa, synthetic construct; identical to SEQ ID NO: 825
  REGION 1..41: note = Description of Artificial Sequence: Synthetic polypeptide

SEQ ID NO: 843 - protein, 41 aa, synthetic construct; identical to SEQ ID NO: 815
  REGION 1..41: note = Description of Artificial Sequence: Synthetic polypeptide

SEQ ID NO: 844 - protein, 41 aa, synthetic construct
  REGION 1..41: note = Description of Artificial Sequence: Synthetic polypeptide
AKHMSMQEGAVTNEGQAAKEFIAWLVKGRVRADLVGDAFDV

SEQ ID NO: 845 - protein, 41 aa, synthetic construct; identical to SEQ ID NO: 841
  REGION 1..41: note = Description of Artificial Sequence: Synthetic polypeptide

SEQ ID NO: 846 - protein, 41 aa, synthetic construct; identical to SEQ ID NO: 818
  REGION 1..41: note = Description of Artificial Sequence: Synthetic polypeptide

SEQ ID NO: 847 - protein, 41 aa, synthetic construct; identical to SEQ ID NO: 830
  REGION 1..41: note = Description of Artificial Sequence: Synthetic polypeptide

SEQ ID NO: 848 - protein, 41 aa, synthetic construct; identical to SEQ ID NO: 818
  REGION 1..41: note = Description of Artificial Sequence: Synthetic polypeptide

SEQ ID NO: 849 - protein, 41 aa, synthetic construct; identical to SEQ ID NO: 818
  REGION 1..41: note = Description of Artificial Sequence: Synthetic polypeptide

SEQ ID NO: 850 - protein, 41 aa, synthetic construct
  REGION 1..41: note = Description of Artificial Sequence: Synthetic polypeptide
AKHMSMQEGAVTGEGQALKEFIAWLVKGRVRADLVGDAFDV

SEQ ID NO: 851 - protein, 41 aa, synthetic construct; identical to SEQ ID NO: 803
  REGION 1..41: note = Description of Artificial Sequence: Synthetic polypeptide

SEQ ID NO: 852 - protein, 41 aa, synthetic construct; identical to SEQ ID NO: 837
  REGION 1..41: note = Description of Artificial Sequence: Synthetic polypeptide

SEQ ID NO: 853 - protein, 41 aa, synthetic construct; identical to SEQ ID NO: 837
  REGION 1..41: note = Description of Artificial Sequence: Synthetic polypeptide

SEQ ID NO: 854 - protein, 41 aa, synthetic construct; identical to SEQ ID NO: 850
  REGION 1..41: note = Description of Artificial Sequence: Synthetic polypeptide

SEQ ID NO: 855 - protein, 41 aa, synthetic construct
  REGION 1..41: note = Description of Artificial Sequence: Synthetic polypeptide
AKHMSMQEGAVTGEGWAAKEFIAWLVKGRVRADLVGDAFDV

SEQ ID NO: 856 - protein, 41 aa, synthetic construct
  REGION 1..41: note = Description of Artificial Sequence: Synthetic polypeptide
AKHMSMQEGAVTGEGQFAKEFIAWLVKGRVRADLVGDAFDV

SEQ ID NO: 857 - protein, 41 aa, synthetic construct; identical to SEQ ID NO: 841
  REGION 1..41: note = Description of Artificial Sequence: Synthetic polypeptide

SEQ ID NO: 858 - protein, 41 aa, synthetic construct; identical to SEQ ID NO: 850
  REGION 1..41: note = Description of Artificial Sequence: Synthetic polypeptide

SEQ ID NO: 859 - protein, 41 aa, synthetic construct; identical to SEQ ID NO: 818
  REGION 1..41: note = Description of Artificial Sequence: Synthetic polypeptide

SEQ ID NO: 860 - protein, 41 aa, synthetic construct; identical to SEQ ID NO: 815
  REGION 1..41: note = Description of Artificial Sequence: Synthetic polypeptide

SEQ ID NO: 861 - protein, 41 aa, synthetic construct; identical to SEQ ID NO: 815
  REGION 1..41: note = Description of Artificial Sequence: Synthetic polypeptide

SEQ ID NO: 862 - protein, 41 aa, synthetic construct; identical to SEQ ID NO: 824
  REGION 1..41: note = Description of Artificial Sequence: Synthetic polypeptide

SEQ ID NO: 863 - protein, 41 aa, synthetic construct; identical to SEQ ID NO: 837
  REGION 1..41: note = Description of Artificial Sequence: Synthetic polypeptide

SEQ ID NO: 864 - protein, 41 aa, synthetic construct; identical to SEQ ID NO: 824
  REGION 1..41: note = Description of Artificial Sequence: Synthetic polypeptide

SEQ ID NO: 865 - protein, 41 aa, synthetic construct; identical to SEQ ID NO: 837
  REGION 1..41: note = Description of Artificial Sequence: Synthetic polypeptide

SEQ ID NO: 866 - protein, 41 aa, synthetic construct; identical to SEQ ID NO: 815
  REGION 1..41: note = Description of Artificial Sequence: Synthetic polypeptide

SEQ ID NO: 867 - protein, 41 aa, synthetic construct; identical to SEQ ID NO: 850
  REGION 1..41: note = Description of Artificial Sequence: Synthetic polypeptide

SEQ ID NO: 868 - protein, 41 aa, synthetic construct
  REGION 1..41: note = Description of Artificial Sequence: Synthetic polypeptide
AKHMSMQEGAVMGEGQAAKEFIAWLVKGRVRADLVGDAFDV

SEQ ID NO: 869 - protein, 41 aa, synthetic construct; identical to SEQ ID NO: 824
  REGION 1..41: note = Description of Artificial Sequence: Synthetic polypeptide

SEQ ID NO: 870 - protein, 41 aa, synthetic construct; identical to SEQ ID NO: 822
  REGION 1..41: note = Description of Artificial Sequence: Synthetic polypeptide

SEQ ID NO: 871 - protein, 41 aa, synthetic construct; identical to SEQ ID NO: 825
  REGION 1..41: note = Description of Artificial Sequence: Synthetic polypeptide

SEQ ID NO: 872 - protein, 41 aa, synthetic construct; identical to SEQ ID NO: 824
  REGION 1..41: note = Description of Artificial Sequence: Synthetic polypeptide

SEQ ID NO: 873 - protein, 41 aa, synthetic construct
  REGION 1..41: note = Description of Artificial Sequence: Synthetic polypeptide
AKHMSMQEGAVTEEGQAAKEFIAWLVKGRVRADLVGDAFDV

SEQ ID NO: 874 - protein, 41 aa, synthetic construct; identical to SEQ ID NO: 837
  REGION 1..41: note = Description of Artificial Sequence: Synthetic polypeptide

SEQ ID NO: 875 - protein, 41 aa, synthetic construct; identical to SEQ ID NO: 825
  REGION 1..41: note = Description of Artificial Sequence: Synthetic polypeptide

SEQ ID NO: 876 - protein, 41 aa, synthetic construct
  REGION 1..41: note = Description of Artificial Sequence: Synthetic polypeptide
AKHMSMQEGAVTGEGQAVKEFIAWLVKGDVRADLVGDAFDV

SEQ ID NO: 877 - protein, 41 aa, synthetic construct; identical to SEQ ID NO: 822
  REGION 1..41: note = Description of Artificial Sequence: Synthetic polypeptide

SEQ ID NO: 878 - protein, 41 aa, synthetic construct; identical to SEQ ID NO: 815
  REGION 1..41: note = Description of Artificial Sequence: Synthetic polypeptide

SEQ ID NO: 879 - protein, 41 aa, synthetic construct; identical to SEQ ID NO: 837
  REGION 1..41: note = Description of Artificial Sequence: Synthetic polypeptide

SEQ ID NO: 880 - protein, 41 aa, synthetic construct; identical to SEQ ID NO: 825
  REGION 1..41: note = Description of Artificial Sequence: Synthetic polypeptide

SEQ ID NO: 881 - protein, 41 aa, synthetic construct; identical to SEQ ID NO: 825
  REGION 1..41: note = Description of Artificial Sequence: Synthetic polypeptide

SEQ ID NO: 882 - protein, 41 aa, synthetic construct; identical to SEQ ID NO: 837
  REGION 1..41: note = Description of Artificial Sequence: Synthetic polypeptide

SEQ ID NO: 883 - protein, 41 aa, synthetic construct; identical to SEQ ID NO: 828
  REGION 1..41: note = Description of Artificial Sequence: Synthetic polypeptide

SEQ ID NO: 884 - protein, 41 aa, synthetic construct; identical to SEQ ID NO: 824
  REGION 1..41: note = Description of Artificial Sequence: Synthetic polypeptide

SEQ ID NO: 885 - protein, 41 aa, synthetic construct; identical to SEQ ID NO: 825
  REGION 1..41: note = Description of Artificial Sequence: Synthetic polypeptide

SEQ ID NO: 886 - protein, 41 aa, synthetic construct
  REGION 1..41: note = Description of Artificial Sequence: Synthetic polypeptide
AKHMSMQEGAVTGEGQAAKEFIAWLVFGRVRADLVGDAFDV

SEQ ID NO: 887 - protein, 41 aa, synthetic construct; identical to SEQ ID NO: 825
  REGION 1..41: note = Description of Artificial Sequence: Synthetic polypeptide

SEQ ID NO: 888 - protein, 41 aa, synthetic construct
  REGION 1..41: note = Description of Artificial Sequence: Synthetic polypeptide
AKHMSMQEGAVTGEGQAWKEFIAWLVKGRVRADLVGDAFDV

SEQ ID NO: 889 - protein, 41 aa, synthetic construct; identical to SEQ ID NO: 802
  REGION 1..41: note = Description of Artificial Sequence: Synthetic polypeptide

SEQ ID NO: 890 - protein, 41 aa, synthetic construct; identical to SEQ ID NO: 830
  REGION 1..41: note = Description of Artificial Sequence: Synthetic polypeptide

SEQ ID NO: 891 - protein, 41 aa, synthetic construct; identical to SEQ ID NO: 802
  REGION 1..41: note = Description of Artificial Sequence: Synthetic polypeptide

SEQ ID NO: 892 - protein, 41 aa, synthetic construct; identical to SEQ ID NO: 818
  REGION 1..41: note = Description of Artificial Sequence: Synthetic polypeptide

SEQ ID NO: 893 - protein, 41 aa, synthetic construct; identical to SEQ ID NO: 818
  REGION 1..41: note = Description of Artificial Sequence: Synthetic polypeptide

SEQ ID NO: 894 - protein, 41 aa, synthetic construct
  REGION 1..41: note = Description of Artificial Sequence: Synthetic polypeptide
AKHMSMQEGAVTGEKQAAKEFIAWLVKGRVRADLVGDAFDV

SEQ ID NO: 895 - protein, 41 aa, synthetic construct
  REGION 1..41: note = Description of Artificial Sequence: Synthetic polypeptide
AKHMSMQEGAVTGEGQAAKEFIAWLVGGRVRADLVGDAFDV

SEQ ID NO: 896 - protein, 41 aa, synthetic construct; identical to SEQ ID NO: 813
  REGION 1..41: note = Description of Artificial Sequence: Synthetic polypeptide

SEQ ID NO: 897 - protein, 41 aa, synthetic construct; identical to SEQ ID NO: 810
  REGION 1..41: note = Description of Artificial Sequence: Synthetic polypeptide

SEQ ID NO: 898 - protein, 41 aa, synthetic construct
  REGION 1..41: note = Description of Artificial Sequence: Synthetic polypeptide
AKHMSMQEGAVTGEGQAAKEFIAWLVKGFVRADLVGDAFDV

SEQ ID NO: 899 - protein, 41 aa, synthetic construct
  REGION 1..41: note = Description of Artificial Sequence: Synthetic polypeptide
AKHMSMQEGAVTGYGQAAKEFIAWLVKGFVRADLVGDAFDV

SEQ ID NO: 900 - protein, 41 aa, synthetic construct; identical to SEQ ID NO: 818
  REGION 1..41: note = Description of Artificial Sequence: Synthetic polypeptide

SEQ ID NO: 901 - protein, 41 aa, synthetic construct
  REGION 1..41: note = Description of Artificial Sequence: Synthetic polypeptide
AKHMSMQEGAVTGTGQAAKEFIAWLVKGIVRADLVGDAFDV

SEQ ID NO: 902 - protein, 41 aa, synthetic construct
  REGION 1..41: note = Description of Artificial Sequence: Synthetic polypeptide
AKHMSMQEGAVTREGQAAKEFIAWLVKGRVRADLVGDAFDV

SEQ ID NO: 903 - protein, 41 aa, synthetic construct
  REGION 1..41: note = Description of Artificial Sequence: Synthetic polypeptide
AKHMSMQEGAVTGEGQAAKEFIAWLVMGRVRADLVGDAFDV

SEQ ID NO: 904 - protein, 41 aa, synthetic construct
  REGION 1..41: note = Description of Artificial Sequence: Synthetic polypeptide
AKHMSMQEGAVTGEGQAAKEFIAWLVKGWVRADLVGDAFDV

SEQ ID NO: 905 - protein, 41 aa, synthetic construct; identical to SEQ ID NO: 810
  REGION 1..41: note = Description of Artificial Sequence: Synthetic polypeptide

SEQ ID NO: 906 - protein, 41 aa, synthetic construct; identical to SEQ ID NO: 799
  REGION 1..41: note = Description of Artificial Sequence: Synthetic polypeptide

SEQ ID NO: 907 - protein, 41 aa, synthetic construct
  REGION 1..41: note = Description of Artificial Sequence: Synthetic polypeptide
AKHMSMQEGAVTGEGQAAKEFIAWLVKGRVRNDLVGDAFDV

SEQ ID NO: 908 - protein, 41 aa, synthetic construct; identical to SEQ ID NO: 810
  REGION 1..41: note = Description of Artificial Sequence: Synthetic polypeptide

SEQ ID NO: 909 - protein, 41 aa, synthetic construct; identical to SEQ ID NO: 850
  REGION 1..41: note = Description of Artificial Sequence: Synthetic polypeptide

SEQ ID NO: 910 - protein, 41 aa, synthetic construct
  REGION 1..41: note = Description of Artificial Sequence: Synthetic polypeptide
AKHMSMQEGAQTGEGQAAKEFIAWLVKGRVRADLVGDAFDV

SEQ ID NO: 911 - protein, 41 aa, synthetic construct
  REGION 1..41: note = Description of Artificial Sequence: Synthetic polypeptide
AKHMSMQEGAVTGEGQAAKEFIAWLLKGRVRADLVGDAFDV

SEQ ID NO: 912 - protein, 41 aa, synthetic construct; identical to SEQ ID NO: 828
  REGION 1..41: note = Description of Artificial Sequence: Synthetic polypeptide

SEQ ID NO: 913 - protein, 41 aa, synthetic construct; identical to SEQ ID NO: 855
  REGION 1..41: note = Description of Artificial Sequence: Synthetic polypeptide

SEQ ID NO: 914 - protein, 41 aa, synthetic construct; identical to SEQ ID NO: 818
  REGION 1..41: note = Description of Artificial Sequence: Synthetic polypeptide

SEQ ID NO: 915 - protein, 41 aa, synthetic construct
  REGION 1..41: note = Description of Artificial Sequence: Synthetic polypeptide
AKHMSMQEGAVTGEGQAAKNFIAWLVKGRVRADLVGDAFDV

SEQ ID NO: 916 - protein, 41 aa, synthetic construct; identical to SEQ ID NO: 828
  REGION 1..41: note = Description of Artificial Sequence: Synthetic polypeptide

SEQ ID NO: 917 - protein, 41 aa, synthetic construct; identical to SEQ ID NO: 818
  REGION 1..41: note = Description of Artificial Sequence: Synthetic polypeptide

SEQ ID NO: 918 - protein, 41 aa, synthetic construct; identical to SEQ ID NO: 803
  REGION 1..41: note = Description of Artificial Sequence: Synthetic polypeptide

SEQ ID NO: 919 - protein, 41 aa, synthetic construct
  REGION 1..41: note = Description of Artificial Sequence: Synthetic polypeptide
AKHMSMQEGAVTGEGQAAKEFIAWLVKGDVRADLVGDAFDV

SEQ ID NO: 920 - protein, 41 aa, synthetic construct; identical to SEQ ID NO: 818
  REGION 1..41: note = Description of Artificial Sequence: Synthetic polypeptide

SEQ ID NO: 921 - protein, 41 aa, synthetic construct; identical to SEQ ID NO: 911
  REGION 1..41: note = Description of Artificial Sequence: Synthetic polypeptide

SEQ ID NO: 922 - protein, 41 aa, synthetic construct; identical to SEQ ID NO: 855
  REGION 1..41: note = Description of Artificial Sequence: Synthetic polypeptide

SEQ ID NO: 923 - protein, 41 aa, synthetic construct
  REGION 1..41: note = Description of Artificial Sequence: Synthetic polypeptide
AKHMSMQEGAVQGEGQAAKEFIAWLVKGRVRADLVGDAFDV

SEQ ID NO: 924 - protein, 41 aa, synthetic construct
  REGION 1..41: note = Description of Artificial Sequence: Synthetic polypeptide
AKHMSMQEGAVTGEIQAAKEFIAWLVKGRVRADLVGDAFDV

SEQ ID NO: 925 - protein, 41 aa, synthetic construct; identical to SEQ ID NO: 815
  REGION 1..41: note = Description of Artificial Sequence: Synthetic polypeptide

SEQ ID NO: 926 - protein, 41 aa, synthetic construct
  REGION 1..41: note = Description of Artificial Sequence: Synthetic polypeptide
AKHMSMQEGAVTGEGQAAWEFIAWLVKGRVRADLVGDAFDV

SEQ ID NO: 927 - protein, 41 aa, synthetic construct
  REGION 1..41: note = Description of Artificial Sequence: Synthetic polypeptide
AKHMSMQEGAVTGEGQAAKSFIAWLVKGRVRADLVGDAFDV

SEQ ID NO: 928 - protein, 41 aa, synthetic construct; identical to SEQ ID NO: 815
  REGION 1..41: note = Description of Artificial Sequence: Synthetic polypeptide

SEQ ID NO: 929 - protein, 41 aa, synthetic construct
  REGION 1..41: note = Description of Artificial Sequence: Synthetic polypeptide
AKHMSMQEGAVTGTGQAAKEFIAWLVKGRVRADLVGDAFDV

SEQ ID NO: 930 - protein, 41 aa, synthetic construct
  REGION 1..41: note = Description of Artificial Sequence: Synthetic polypeptide
AKHMSMQEGAVTGEGYAAKEFIAWLVKGRVRADLVGDAFDV

SEQ ID NO: 931 - protein, 41 aa, synthetic construct
  REGION 1..41: note = Description of Artificial Sequence: Synthetic polypeptide
AKHMSMQEGAVTGEGQAAVEFIAWLVKGRVRADLVGDAFDV

SEQ ID NO: 932 - protein, 41 aa, synthetic construct; identical to SEQ ID NO: 828
  REGION 1..41: note = Description of Artificial Sequence: Synthetic polypeptide

SEQ ID NO: 933 - protein, 41 aa, synthetic construct
  REGION 1..41: note = Description of Artificial Sequence: Synthetic polypeptide
AKHMSMQEGAVTGEAQAAKEFIAWLVKGRVRADLVGDAFDV

SEQ ID NO: 934 - protein, 41 aa, synthetic construct
  REGION 1..41: note = Description of Artificial Sequence: Synthetic polypeptide
AKHMSMQEGAVTGKGQAAKEFIAWLVKGRVRADLVGDAFDV

SEQ ID NO: 935 - protein, 41 aa, synthetic construct
  REGION 1..41: note = Description of Artificial Sequence: Synthetic polypeptide
AKHMSMQEGAVTGEGQAAYEFIAWLVKGRVRADLVGDAFDV

SEQ ID NO: 936 - protein, 41 aa, synthetic construct; identical to SEQ ID NO: 828
  REGION 1..41: note = Description of Artificial Sequence: Synthetic polypeptide

SEQ ID NO: 937 - protein, 41 aa, synthetic construct; identical to SEQ ID NO: 828
  REGION 1..41: note = Description of Artificial Sequence: Synthetic polypeptide

SEQ ID NO: 938 - protein, 41 aa, synthetic construct
  REGION 1..41: note = Description of Artificial Sequence: Synthetic polypeptide
AKHMSMQEGAVTGEGWAAKEFIFWLVKGRVRADLVGDAFDV

SEQ ID NO: 939 - protein, 41 aa, synthetic construct; identical to SEQ ID NO: 828
  REGION 1..41: note = Description of Artificial Sequence: Synthetic polypeptide

SEQ ID NO: 940 - protein, 41 aa, synthetic construct; identical to SEQ ID NO: 929
  REGION 1..41: note = Description of Artificial Sequence: Synthetic polypeptide

SEQ ID NO: 941 - protein, 41 aa, synthetic construct; identical to SEQ ID NO: 818
  REGION 1..41: note = Description of Artificial Sequence: Synthetic polypeptide

SEQ ID NO: 942 - protein, 41 aa, synthetic construct
  REGION 1..41: note = Description of Artificial Sequence: Synthetic polypeptide
AKHMSMQEGAVTGEGQAAKEFIAWLVKGRVRPDLVGDAFDV

SEQ ID NO: 943 - protein, 41 aa, synthetic construct; identical to SEQ ID NO: 929
  REGION 1..41: note = Description of Artificial Sequence: Synthetic polypeptide

SEQ ID NO: 944 - protein, 41 aa, synthetic construct; identical to SEQ ID NO: 810
  REGION 1..41: note = Description of Artificial Sequence: Synthetic polypeptide

SEQ ID NO: 945 - protein, 41 aa, synthetic construct; identical to SEQ ID NO: 815
  REGION 1..41: note = Description of Artificial Sequence: Synthetic polypeptide

SEQ ID NO: 946 - protein, 41 aa, synthetic construct
  REGION 1..41: note = Description of Artificial Sequence: Synthetic polypeptide
AKHMSMQEGAVTGEGFAAKEFIAWLVKGRVRADLVGDAFDV

SEQ ID NO: 947 - protein, 41 aa, synthetic construct; identical to SEQ ID NO: 904
  REGION 1..41: note = Description of Artificial Sequence: Synthetic polypeptide

SEQ ID NO: 948 - protein, 41 aa, synthetic construct; identical to SEQ ID NO: 830
  REGION 1..41: note = Description of Artificial Sequence: Synthetic polypeptide

SEQ ID NO: 949 - protein, 41 aa, synthetic construct; identical to SEQ ID NO: 818
  REGION 1..41: note = Description of Artificial Sequence: Synthetic polypeptide

SEQ ID NO: 950 - protein, 41 aa, synthetic construct; identical to SEQ ID NO: 822
  REGION 1..41: note = Description of Artificial Sequence: Synthetic polypeptide

SEQ ID NO: 951 - protein, 41 aa, synthetic construct; identical to SEQ ID NO: 844
  REGION 1..41: note = Description of Artificial Sequence: Synthetic polypeptide

SEQ ID NO: 952 - protein, 41 aa, synthetic construct
  REGION 1..41: note = Description of Artificial Sequence: Synthetic polypeptide
AKHMSMQEGAVTGEGQWAKEFIAWLVKGRVRADLVGDAFDV

SEQ ID NO: 953 - protein, 41 aa, synthetic construct; identical to SEQ ID NO: 837
  REGION 1..41: note = Description of Artificial Sequence: Synthetic polypeptide

SEQ ID NO: 954 - protein, 41 aa, synthetic construct; identical to SEQ ID NO: 841
  REGION 1..41: note = Description of Artificial Sequence: Synthetic polypeptide

SEQ ID NO: 955 - protein, 41 aa, synthetic construct; identical to SEQ ID NO: 837
  REGION 1..41: note = Description of Artificial Sequence: Synthetic polypeptide

SEQ ID NO: 956 - protein, 41 aa, synthetic construct; identical to SEQ ID NO: 809
  REGION 1..41: note = Description of Artificial Sequence: Synthetic polypeptide

SEQ ID NO: 957 - protein, 41 aa, synthetic construct; identical to SEQ ID NO: 818
  REGION 1..41: note = Description of Artificial Sequence: Synthetic polypeptide

SEQ ID NO: 958 - protein, 41 aa, synthetic construct
  REGION 1..41: note = Description of Artificial Sequence: Synthetic polypeptide
AKHMSMQEGAVTGHGQAAKEFIAWLVKGRVRADLVGDAFDV

SEQ ID NO: 959 - protein, 41 aa, synthetic construct; identical to SEQ ID NO: 855
  REGION 1..41: note = Description of Artificial Sequence: Synthetic polypeptide

SEQ ID NO: 960 - protein, 41 aa, synthetic construct; identical to SEQ ID NO: 915
  REGION 1..41: note = Description of Artificial Sequence: Synthetic polypeptide

SEQ ID NO: 961 - protein, 41 aa, synthetic construct; identical to SEQ ID NO: 958
  REGION 1..41: note = Description of Artificial Sequence: Synthetic polypeptide

SEQ ID NO: 962 - protein, 41 aa, synthetic construct; identical to SEQ ID NO: 813
  REGION 1..41: note = Description of Artificial Sequence: Synthetic polypeptide

SEQ ID NO: 963 - protein, 41 aa, synthetic construct; identical to SEQ ID NO: 802
  REGION 1..41: note = Description of Artificial Sequence: Synthetic polypeptide

SEQ ID NO: 964 - protein, 41 aa, synthetic construct; identical to SEQ ID NO: 805
  REGION 1..41: note = Description of Artificial Sequence: Synthetic polypeptide

SEQ ID NO: 965 - protein, 41 aa, synthetic construct; identical to SEQ ID NO: 946
  REGION 1..41: note = Description of Artificial Sequence: Synthetic polypeptide

SEQ ID NO: 966 - protein, 41 aa, synthetic construct; identical to SEQ ID NO: 828
  REGION 1..41: note = Description of Artificial Sequence: Synthetic polypeptide

SEQ ID NO: 967 - protein, 41 aa, synthetic construct; identical to SEQ ID NO: 855
  REGION 1..41: note = Description of Artificial Sequence: Synthetic polypeptide

SEQ ID NO: 968 - protein, 41 aa, synthetic construct
  REGION 1..41: note = Description of Artificial Sequence: Synthetic polypeptide
AKHMSMQEGAVTGEGPAAKEFIAWLVKGRVRADLVGDAFDV

SEQ ID NO: 969 - protein, 41 aa, synthetic construct; identical to SEQ ID NO: 898
  REGION 1..41: note = Description of Artificial Sequence: Synthetic polypeptide

SEQ ID NO: 970 - protein, 41 aa, synthetic construct; identical to SEQ ID NO: 850
  REGION 1..41: note = Description of Artificial Sequence: Synthetic polypeptide

SEQ ID NO: 971 - protein, 41 aa, synthetic construct; identical to SEQ ID NO: 815
  REGION 1..41: note = Description of Artificial Sequence: Synthetic polypeptide

SEQ ID NO: 972 - protein, 41 aa, synthetic construct; identical to SEQ ID NO: 813
  REGION 1..41: note = Description of Artificial Sequence: Synthetic polypeptide

SEQ ID NO: 973 - protein, 41 aa, synthetic construct
  REGION 1..41: note = Description of Artificial Sequence: Synthetic polypeptide
AKHMSMQEGAVTGEGQSAKEFIAWLVKGRVRADLVGDAFDV

SEQ ID NO: 974 - protein, 41 aa, synthetic construct; identical to SEQ ID NO: 824
  REGION 1..41: note = Description of Artificial Sequence: Synthetic polypeptide

SEQ ID NO: 975 - protein, 41 aa, synthetic construct; identical to SEQ ID NO: 807
  REGION 1..41: note = Description of Artificial Sequence: Synthetic polypeptide

SEQ ID NO: 976 - protein, 41 aa, synthetic construct; identical to SEQ ID NO: 942
  REGION 1..41: note = Description of Artificial Sequence: Synthetic polypeptide

SEQ ID NO: 977 - protein, 41 aa, synthetic construct; identical to SEQ ID NO: 837
  REGION 1..41: note = Description of Artificial Sequence: Synthetic polypeptide

SEQ ID NO: 978 - protein, 8 aa, synthetic construct
  REGION 1..8: note = Description of Artificial Sequence: Synthetic peptide
SSNIADNY

SEQ ID NO: 979 - protein, 8 aa, synthetic construct
  REGION 1..8: note = Description of Artificial Sequence: Synthetic peptide
TSNIANNF

SEQ ID NO: 980 - protein, 8 aa, synthetic construct
  REGION 1..8: note = Description of Artificial Sequence: Synthetic peptide
GSNIGNND

SEQ ID NO: 981 - protein, 8 aa, synthetic construct
  REGION 1..8: note = Description of Artificial Sequence: Synthetic peptide
SSNIGNTY

SEQ ID NO: 982 - protein, 8 aa, synthetic construct
  REGION 1..8: note = Description of Artificial Sequence: Synthetic peptide
SSNIGNEY

SEQ ID NO: 983 - protein, 8 aa, synthetic construct
  REGION 1..8: note = Description of Artificial Sequence: Synthetic peptide
SSNIGNND

SEQ ID NO: 984 - protein, 8 aa, synthetic construct
  REGION 1..8: note = Description of Artificial Sequence: Synthetic peptide
TSNIANNF

SEQ ID NO: 985 - protein, 8 aa, synthetic construct
  REGION 1..8: note = Description of Artificial Sequence: Synthetic peptide
SSNIGNNP

SEQ ID NO: 986 - protein, 8 aa, synthetic construct
  REGION 1..8: note = Description of Artificial Sequence: Synthetic peptide
SSNIGNNY

SEQ ID NO: 987 - protein, 8 aa, synthetic construct
  REGION 1..8: note = Description of Artificial Sequence: Synthetic peptide
SSNIADNY

SEQ ID NO: 988 - protein, 8 aa, synthetic construct
  REGION 1..8: note = Description of Artificial Sequence: Synthetic peptide
SSNIGNQY

SEQ ID NO: 989 - protein, 8 aa, synthetic construct
  REGION 1..8: note = Description of Artificial Sequence: Synthetic peptide
SSNIGRNF

SEQ ID NO: 990 - protein, 8 aa, synthetic construct
  REGION 1..8: note = Description of Artificial Sequence: Synthetic peptide
SSNIGNND

SEQ ID NO: 991 - protein, 8 aa, synthetic construct
  REGION 1..8: note = Description of Artificial Sequence: Synthetic peptide
SSTIGNNY

SEQ ID NO: 992 - protein, 8 aa, synthetic construct
  REGION 1..8: note = Description of Artificial Sequence: Synthetic peptide
SSNIGNKY

SEQ ID NO: 993 - protein, 8 aa, synthetic construct
  REGION 1..8: note = Description of Artificial Sequence: Synthetic peptide
SSNIGNDY

SEQ ID NO: 994 - protein, 8 aa, synthetic construct
  REGION 1..8: note = Description of Artificial Sequence: Synthetic peptide
SSNIGSKD

SEQ ID NO: 995 - protein, 8 aa, synthetic construct
  REGION 1..8: note = Description of Artificial Sequence: Synthetic peptide
SSNIGDND

SEQ ID NO: 996 - protein, 8 aa, synthetic construct
  REGION 1..8: note = Description of Artificial Sequence: Synthetic peptide
SSNIGSKY

SEQ ID NO: 997 - protein, 8 aa, synthetic construct
  REGION 1..8: note = Description of Artificial Sequence: Synthetic peptide
SSNIGNNP

SEQ ID NO: 998 - protein, 8 aa, synthetic construct
  REGION 1..8: note = Description of Artificial Sequence: Synthetic peptide
SSNIGNKY

SEQ ID NO: 999 - protein, 8 aa, synthetic construct
  REGION 1..8: note = Description of Artificial Sequence: Synthetic peptide
SSNIGSHY

SEQ ID NO: 1000 - protein, 8 aa, synthetic construct
  REGION 1..8: note = Description of Artificial Sequence: Synthetic peptide
SSTIGNNY

SEQ ID NO: 1001 - protein, 8 aa, synthetic construct
  REGION 1..8: note = Description of Artificial Sequence: Synthetic peptide
TSNIGNNH

SEQ ID NO: 1002 - protein, 8 aa, synthetic construct
  REGION 1..8: note = Description of Artificial Sequence: Synthetic peptide
SSNIGSNY

SEQ ID NO: 1003 - protein, 8 aa, synthetic construct
  REGION 1..8: note = Description of Artificial Sequence: Synthetic peptide
GSNIGNND

SEQ ID NO: 1004 - protein, 8 aa, synthetic construct
  REGION 1..8: note = Description of Artificial Sequence: Synthetic peptide
SSNIGSKY

SEQ ID NO: 1005 - protein, 8 aa, synthetic construct
  REGION 1..8: note = Description of Artificial Sequence: Synthetic peptide
SSNIGNND

SEQ ID NO: 1006 - protein, 8 aa, synthetic construct
  REGION 1..8: note = Description of Artificial Sequence: Synthetic peptide
SSNIGNDF

SEQ ID NO: 1007 - protein, 8 aa, synthetic construct
  REGION 1..8: note = Description of Artificial Sequence: Synthetic peptide
SSNIGNNF

SEQ ID NO: 1008 - protein, 8 aa, synthetic construct
  REGION 1..8: note = Description of Artificial Sequence: Synthetic peptide
SSNIGNND

SEQ ID NO: 1009 - protein, 8 aa, synthetic construct
  REGION 1..8: note = Description of Artificial Sequence: Synthetic peptide
SSNIGNHD

SEQ ID NO: 1010 - protein, 8 aa, synthetic construct
  REGION 1..8: note = Description of Artificial Sequence: Synthetic peptide
SSNIGSNF

SEQ ID NO: 1011 - protein, 8 aa, synthetic construct
  REGION 1..8: note = Description of Artificial Sequence: Synthetic peptide
SSNIGDND

SEQ ID NO: 1012 - protein, 8 aa, synthetic construct
  REGION 1..8: note = Description of Artificial Sequence: Synthetic peptide
SSNIGNND

SEQ ID NO: 1013 - protein, 8 aa, synthetic construct
  REGION 1..8: note = Description of Artificial Sequence: Synthetic peptide
SSNIGDND

SEQ ID NO: 1014 - protein, 8 aa, synthetic construct
  REGION 1..8: note = Description of Artificial Sequence: Synthetic peptide
SSNIGKNF

SEQ ID NO: 1015 - protein, 8 aa, synthetic construct
  REGION 1..8: note = Description of Artificial Sequence: Synthetic peptide
SSNIGNEY

SEQ ID NO: 1016 - protein, 8 aa, synthetic construct
  REGION 1..8: note = Description of Artificial Sequence: Synthetic peptide
SSNIGSKY

SEQ ID NO: 1017 - protein, 8 aa, synthetic construct
  REGION 1..8: note = Description of Artificial Sequence: Synthetic peptide
SSDIGNKY

SEQ ID NO: 1018 - protein, 8 aa, synthetic construct
  REGION 1..8: note = Description of Artificial Sequence: Synthetic peptide
SSNIGNNF

SEQ ID NO: 1019 - protein, 8 aa, synthetic construct
  REGION 1..8: note = Description of Artificial Sequence: Synthetic peptide
SSNIGSNY

SEQ ID NO: 1020 - protein, 8 aa, synthetic construct
  REGION 1..8: note = Description of Artificial Sequence: Synthetic peptide
SSNIGNKY

SEQ ID NO: 1021 - protein, 8 aa, synthetic construct
  REGION 1..8: note = Description of Artificial Sequence: Synthetic peptide
SSNIGKDY

SEQ ID NO: 1022 - protein, 8 aa, synthetic construct
  REGION 1..8: note = Description of Artificial Sequence: Synthetic peptide
TSNIGNND

SEQ ID NO: 1023 - protein, 8 aa, synthetic construct
  REGION 1..8: note = Description of Artificial Sequence: Synthetic peptide
GSNIGNND

SEQ ID NO: 1024 - protein, 8 aa, synthetic construct
  REGION 1..8: note = Description of Artificial Sequence: Synthetic peptide
TSNIGNNY

SEQ ID NO: 1025 - protein, 8 aa, synthetic construct
  REGION 1..8: note = Description of Artificial Sequence: Synthetic peptide
SSNIGRNF

SEQ ID NO: 1026 - protein, 8 aa, synthetic construct
  REGION 1..8: note = Description of Artificial Sequence: Synthetic peptide
SSNIGKDY

SEQ ID NO: 1027 - protein, 8 aa, synthetic construct
  REGION 1..8: note = Description of Artificial Sequence: Synthetic peptide
SSNIGSND

SEQ ID NO: 1028 - protein, 8 aa, synthetic construct
  REGION 1..8: note = Description of Artificial Sequence: Synthetic peptide
SSNIGKHY

SEQ ID NO: 1029 - protein, 8 aa, synthetic construct
  REGION 1..8: note = Description of Artificial Sequence: Synthetic peptide
SSNIGSNY

SEQ ID NO: 1030 - protein, 8 aa, synthetic construct
  REGION 1..8: note = Description of Artificial Sequence: Synthetic peptide
SSNIGNNY

SEQ ID NO: 1031 - protein, 8 aa, synthetic construct
  REGION 1..8: note = Description of Artificial Sequence: Synthetic peptide
SSNIGNKY

SEQ ID NO: 1032 - protein, 8 aa, synthetic construct
  REGION 1..8: note = Description of Artificial Sequence: Synthetic peptide
SSNIGKYY

SEQ ID NO: 1033 - protein, 8 aa, synthetic construct
  REGION 1..8: note = Description of Artificial Sequence: Synthetic peptide
SSNIGSNL

SEQ ID NO: 1034 - protein, 8 aa, synthetic construct
  REGION 1..8: note = Description of Artificial Sequence: Synthetic peptide
RSNIGNYY

SEQ ID NO: 1035 - protein, 8 aa, synthetic construct
  REGION 1..8: note = Description of Artificial Sequence: Synthetic peptide
SSNIGNNF

SEQ ID NO: 1036 - protein, 8 aa, synthetic construct
  REGION 1..8: note = Description of Artificial Sequence: Synthetic peptide
SSNIGNKY

SEQ ID NO: 1037 - protein, 8 aa, synthetic construct
  REGION 1..8: note = Description of Artificial Sequence: Synthetic peptide
SSNIENND

SEQ ID NO: 1038 - protein, 8 aa, synthetic construct
  REGION 1..8: note = Description of Artificial Sequence: Synthetic peptide
SSNIGSNH

SEQ ID NO: 1039 - protein, 8 aa, synthetic construct
  REGION 1..8: note = Description of Artificial Sequence: Synthetic peptide
SSTIGNNY

SEQ ID NO: 1040 - protein, 8 aa, synthetic construct
  REGION 1..8: note = Description of Artificial Sequence: Synthetic peptide
SSNIGSKD

SEQ ID NO: 1041 - protein, 8 aa, synthetic construct
  REGION 1..8: note = Description of Artificial Sequence: Synthetic peptide
SSNIGKDF

SEQ ID NO: 1042 - protein, 8 aa, synthetic construct
  REGION 1..8: note = Description of Artificial Sequence: Synthetic peptide
SSNIGKDY

SEQ ID NO: 1043 - protein, 8 aa, synthetic construct
  REGION 1..8: note = Description of Artificial Sequence: Synthetic peptide
SSNIGSNY

SEQ ID NO: 1044 - protein, 8 aa, synthetic construct
  REGION 1..8: note = Description of Artificial Sequence: Synthetic peptide
SSNIGSND

SEQ ID NO: 1045 - protein, 8 aa, synthetic construct
  REGION 1..8: note = Description of Artificial Sequence: Synthetic peptide
SSNIGNND

SEQ ID NO: 1046 - protein, 8 aa, synthetic construct
  REGION 1..8: note = Description of Artificial Sequence: Synthetic peptide
SSNIGNHF

SEQ ID NO: 1047 - protein, 8 aa, synthetic construct
  REGION 1..8: note = Description of Artificial Sequence: Synthetic peptide
SSNIGNNP

SEQ ID NO: 1048 - protein, 8 aa, synthetic construct
  REGION 1..8: note = Description of Artificial Sequence: Synthetic peptide
SSTIGNNY

SEQ ID NO: 1049 - protein, 8 aa, synthetic construct
  REGION 1..8: note = Description of Artificial Sequence: Synthetic peptide
SSTIGNNY

SEQ ID NO: 1050 - protein, 8 aa, synthetic construct
  REGION 1..8: note = Description of Artificial Sequence: Synthetic peptide
SSNIGSNH

SEQ ID NO: 1051 - protein, 8 aa, synthetic construct
  REGION 1..8: note = Description of Artificial Sequence: Synthetic peptide
SSNIGSKY

SEQ ID NO: 1052 - protein, 8 aa, synthetic construct
  REGION 1..8: note = Description of Artificial Sequence: Synthetic peptide
SSNIGKYY

SEQ ID NO: 1053 - protein, 8 aa, synthetic construct
  REGION 1..8: note = Description of Artificial Sequence: Synthetic peptide
SSNIGNND

SEQ ID NO: 1054 - protein, 8 aa, synthetic construct
  REGION 1..8: note = Description of Artificial Sequence: Synthetic peptide
SSNIENNH

SEQ ID NO: 1055 - protein, 8 aa, synthetic construct
  REGION 1..8: note = Description of Artificial Sequence: Synthetic peptide
SSNIGKYY

SEQ ID NO: 1056 - protein, 8 aa, synthetic construct
  REGION 1..8: note = Description of Artificial Sequence: Synthetic peptide
SSSIGNNY

SEQ ID NO: 1057 - protein, 8 aa, synthetic construct
  REGION 1..8: note = Description of Artificial Sequence: Synthetic peptide
SSNIGNNF

SEQ ID NO: 1058 - protein, 8 aa, synthetic construct
  REGION 1..8: note = Description of Artificial Sequence: Synthetic peptide
SSNIGNNY

SEQ ID NO: 1059 - protein, 8 aa, synthetic construct
  REGION 1..8: note = Description of Artificial Sequence: Synthetic peptide
SSNIGSND

SEQ ID NO: 1060 - protein, 8 aa, synthetic construct
  REGION 1..8: note = Description of Artificial Sequence: Synthetic peptide
SSNIGNNY

SEQ ID NO: 1061 - protein, 8 aa, synthetic construct
  REGION 1..8: note = Description of Artificial Sequence: Synthetic peptide
SSNIGTNF

SEQ ID NO: 1062 - protein, 8 aa, synthetic construct
  REGION 1..8: note = Description of Artificial Sequence: Synthetic peptide
SSNIGKDY

SEQ ID NO: 1063 - protein, 8 aa, synthetic construct
  REGION 1..8: note = Description of Artificial Sequence: Synthetic peptide
SSNIENNH

SEQ ID NO: 1064 - protein, 8 aa, synthetic construct
  REGION 1..8: note = Description of Artificial Sequence: Synthetic peptide
SSNIGNNH

SEQ ID NO: 1065 - protein, 8 aa, synthetic construct
  REGION 1..8: note = Description of Artificial Sequence: Synthetic peptide
SSNIGNND

SEQ ID NO: 1066 - protein, 8 aa, synthetic construct
  REGION 1..8: note = Description of Artificial Sequence: Synthetic peptide
SSTIGNNY

SEQ ID NO: 1067 - protein, 8 aa, synthetic construct
  REGION 1..8: note = Description of Artificial Sequence: Synthetic peptide
SSNIGNEY

SEQ ID NO: 1068 - protein, 8 aa, synthetic construct
  REGION 1..8: note = Description of Artificial Sequence: Synthetic peptide
SSNIGNHD

SEQ ID NO: 1069 - protein, 8 aa, synthetic construct
  REGION 1..8: note = Description of Artificial Sequence: Synthetic peptide
SSNIGKRS

SEQ ID NO: 1070 - protein, 8 aa, synthetic construct
  REGION 1..8: note = Description of Artificial Sequence: Synthetic peptide
SSNIENND

SEQ ID NO: 1071 - protein, 8 aa, synthetic construct
  REGION 1..8: note = Description of Artificial Sequence: Synthetic peptide
SSNIGNND

SEQ ID NO: 1072 - protein, 8 aa, synthetic construct
  REGION 1..8: note = Description of Artificial Sequence: Synthetic peptide
SSNIGNHD

SEQ ID NO: 1073 - protein, 8 aa, synthetic construct
  REGION 1..8: note = Description of Artificial Sequence: Synthetic peptide
SSNIADNY

SEQ ID NO: 1074 - protein, 8 aa, synthetic construct
  REGION 1..8: note = Description of Artificial Sequence: Synthetic peptide
GSNIGNND

SEQ ID NO: 1075 - protein, 8 aa, synthetic construct
  REGION 1..8: note = Description of Artificial Sequence: Synthetic peptide
SSNIGNND

SEQ ID NO: 1076 - protein, 8 aa, synthetic construct
  REGION 1..8: note = Description of Artificial Sequence: Synthetic peptide
SSNIGSKY

SEQ ID NO: 1077 - protein, 8 aa, synthetic construct
  REGION 1..8: note = Description of Artificial Sequence: Synthetic peptide
SSNIGSDY

SEQ ID NO: 1078 - protein, 8 aa, synthetic construct
  REGION 1..8: note = Description of Artificial Sequence: Synthetic peptide
SSNIGSNY

SEQ ID NO: 1079 - protein, 8 aa, synthetic construct
  REGION 1..8: note = Description of Artificial Sequence: Synthetic peptide
SSNIGNNP

SEQ ID NO: 1080 - protein, 8 aa, synthetic construct
  REGION 1..8: note = Description of Artificial Sequence: Synthetic peptide
SSNIGNYY

SEQ ID NO: 1081 - protein, 8 aa, synthetic construct
  REGION 1..8: note = Description of Artificial Sequence: Synthetic peptide
SSNIGNND

SEQ ID NO: 1082 - protein, 8 aa, synthetic construct
  REGION 1..8: note = Description of Artificial Sequence: Synthetic peptide
SSNIGSDY

SEQ ID NO: 1083 - protein, 8 aa, synthetic construct
  REGION 1..8: note = Description of Artificial Sequence: Synthetic peptide
SSDIGNKY

SEQ ID NO: 1084 - protein, 8 aa, synthetic construct
  REGION 1..8: note = Description of Artificial Sequence: Synthetic peptide
SSNIGSNH

SEQ ID NO: 1085 - protein, 8 aa, synthetic construct
  REGION 1..8: note = Description of Artificial Sequence: Synthetic peptide
TSNIGSNF

SEQ ID NO: 1086 - protein, 8 aa, synthetic construct
  REGION 1..8: note = Description of Artificial Sequence: Synthetic peptide
SSNIENND

SEQ ID NO: 1087 - protein, 8 aa, synthetic construct
  REGION 1..8: note = Description of Artificial Sequence: Synthetic peptide
SSSIGNNY

SEQ ID NO: 1088 - protein, 8 aa, synthetic construct
  REGION 1..8: note = Description of Artificial Sequence: Synthetic peptide
SSNIGSKY

SEQ ID NO: 1089 - protein, 8 aa, synthetic construct
  REGION 1..8: note = Description of Artificial Sequence: Synthetic peptide
SSNIGNND

SEQ ID NO: 1090 - protein, 8 aa, synthetic construct
  REGION 1..8: note = Description of Artificial Sequence: Synthetic peptide
SSNIGNNY

SEQ ID NO: 1091 - protein, 8 aa, synthetic construct
  REGION 1..8: note = Description of Artificial Sequence: Synthetic peptide
TSNIGNNY

SEQ ID NO: 1092 - protein, 8 aa, synthetic construct
  REGION 1..8: note = Description of Artificial Sequence: Synthetic peptide
SSNIGNDY

SEQ ID NO: 1093 - protein, 8 aa, synthetic construct
  REGION 1..8: note = Description of Artificial Sequence: Synthetic peptide
SSNIGNDY

SEQ ID NO: 1094 - protein, 8 aa, synthetic construct
  REGION 1..8: note = Description of Artificial Sequence: Synthetic peptide
SSNIGNND

SEQ ID NO: 1095 - protein, 8 aa, synthetic construct
  REGION 1..8: note = Description of Artificial Sequence: Synthetic peptide
SSNIENND

SEQ ID NO: 1096 - protein, 8 aa, synthetic construct
  REGION 1..8: note = Description of Artificial Sequence: Synthetic peptide
RSNIGNNF

SEQ ID NO: 1097 - protein, 8 aa, synthetic construct
  REGION 1..8: note = Description of Artificial Sequence: Synthetic peptide
SSSIGNNY

SEQ ID NO: 1098 - protein, 8 aa, synthetic construct
  REGION 1..8: note = Description of Artificial Sequence: Synthetic peptide
SSNIGNND

SEQ ID NO: 1099 - protein, 8 aa, synthetic construct
  REGION 1..8: note = Description of Artificial Sequence: Synthetic peptide
SSNIGSKY

SEQ ID NO: 1100 - protein, 8 aa, synthetic construct
  REGION 1..8: note = Description of Artificial Sequence: Synthetic peptide
SSNIGSKY

SEQ ID NO: 1101 - protein, 8 aa, synthetic construct
  REGION 1..8: note = Description of Artificial Sequence: Synthetic peptide
SSNIGSKD

SEQ ID NO: 1102 - protein, 8 aa, synthetic construct
  REGION 1..8: note = Description of Artificial Sequence: Synthetic peptide
TSNIGNNY

SEQ ID NO: 1103 - protein, 8 aa, synthetic construct
  REGION 1..8: note = Description of Artificial Sequence: Synthetic peptide
SSNIGSHY

SEQ ID NO: 1104 - protein, 8 aa, synthetic construct
  REGION 1..8: note = Description of Artificial Sequence: Synthetic peptide
SSDIGNKY

SEQ ID NO: 1105 - protein, 8 aa, synthetic construct
  REGION 1..8: note = Description of Artificial Sequence: Synthetic peptide
SSNIGNND

SEQ ID NO: 1106 - protein, 8 aa, synthetic construct
  REGION 1..8: note = Description of Artificial Sequence: Synthetic peptide
TSNIGNNY

SEQ ID NO: 1107 - protein, 8 aa, synthetic construct
  REGION 1..8: note = Description of Artificial Sequence: Synthetic peptide
TSNIGNNH

SEQ ID NO: 1108 - protein, 8 aa, synthetic construct
  REGION 1..8: note = Description of Artificial Sequence: Synthetic peptide
SSTIGNNY

SEQ ID NO: 1109 - protein, 8 aa, synthetic construct
  REGION 1..8: note = Description of Artificial Sequence: Synthetic peptide
RSNIGNYY

SEQ ID NO: 1110 - protein, 8 aa, synthetic construct
  REGION 1..8: note = Description of Artificial Sequence: Synthetic peptide
SSNIGSKY

SEQ ID NO: 1111 - protein, 8 aa, synthetic construct
  REGION 1..8: note = Description of Artificial Sequence: Synthetic peptide
SSNIGSNY

SEQ ID NO: 1112 - protein, 8 aa, synthetic construct
  REGION 1..8: note = Description of Artificial Sequence: Synthetic peptide
SSTIGNNY

SEQ ID NO: 1113 - protein, 8 aa, synthetic construct
  REGION 1..8: note = Description of Artificial Sequence: Synthetic peptide
SSNIGSKD

SEQ ID NO: 1114 - protein, 8 aa, synthetic construct
  REGION 1..8: note = Description of Artificial Sequence: Synthetic peptide
TSNIGNNH

SEQ ID NO: 1115 - protein, 8 aa, synthetic construct
  REGION 1..8: note = Description of Artificial Sequence: Synthetic peptide
SSNIGNHF

SEQ ID NO: 1116 - protein, 8 aa, synthetic construct
  REGION 1..8: note = Description of Artificial Sequence: Synthetic peptide
SSNIGKYY

SEQ ID NO: 1117 - protein, 8 aa, synthetic construct
  REGION 1..8: note = Description of Artificial Sequence: Synthetic peptide
SSNIGNND

SEQ ID NO: 1118 - protein, 8 aa, synthetic construct
  REGION 1..8: note = Description of Artificial Sequence: Synthetic peptide
SSNIGNTY

SEQ ID NO: 1119 - protein, 8 aa, synthetic construct
  REGION 1..8: note = Description of Artificial Sequence: Synthetic peptide
SSNIGSDY

SEQ ID NO: 1120 - protein, 8 aa, synthetic construct
  REGION 1..8: note = Description of Artificial Sequence: Synthetic peptide
TSNIGKNF

SEQ ID NO: 1121 - protein, 8 aa, synthetic construct
  REGION 1..8: note = Description of Artificial Sequence: Synthetic peptide
SSNIGKYY

SEQ ID NO: 1122 - protein, 8 aa, synthetic construct
  REGION 1..8: note = Description of Artificial Sequence: Synthetic peptide
SSNIGDND

SEQ ID NO: 1123 - protein, 8 aa, synthetic construct
  REGION 1..8: note = Description of Artificial Sequence: Synthetic peptide
SSNIGKNF

SEQ ID NO: 1124 - protein, 8 aa, synthetic construct
  REGION 1..8: note = Description of Artificial Sequence: Synthetic peptide
SSNIGSKY

SEQ ID NO: 1125 - protein, 8 aa, synthetic construct
  REGION 1..8: note = Description of Artificial Sequence: Synthetic peptide
SSNIGSKD

SEQ ID NO: 1126 - protein, 8 aa, synthetic construct
  REGION 1..8: note = Description of Artificial Sequence: Synthetic peptide
SSNIGNKY

SEQ ID NO: 1127 - protein, 8 aa, synthetic construct
  REGION 1..8: note = Description of Artificial Sequence: Synthetic peptide
SSNIGNNF

SEQ ID NO: 1128 - protein, 8 aa, synthetic construct
  REGION 1..8: note = Description of Artificial Sequence: Synthetic peptide
SSNIGSND

SEQ ID NO: 1129 - protein, 8 aa, synthetic construct
  REGION 1..8: note = Description of Artificial Sequence: Synthetic peptide
SSNIGNQY

SEQ ID NO: 1130 - protein, 8 aa, synthetic construct
  REGION 1..8: note = Description of Artificial Sequence: Synthetic peptide
SSNIGNND

SEQ ID NO: 1131 - protein, 8 aa, synthetic construct
  REGION 1..8: note = Description of Artificial Sequence: Synthetic peptide
SSNIGNNP

SEQ ID NO: 1132 - protein, 8 aa, synthetic construct
  REGION 1..8: note = Description of Artificial Sequence: Synthetic peptide
SSNIGNNL

SEQ ID NO: 1133 - protein, 8 aa, synthetic construct
  REGION 1..8: note = Description of Artificial Sequence: Synthetic peptide
SSNIGNKY

SEQ ID NO: 1134 - protein, 8 aa, synthetic construct
  REGION 1..8: note = Description of Artificial Sequence: Synthetic peptide
SSNIGNNY

SEQ ID NO: 1135 - protein, 8 aa, synthetic construct
  REGION 1..8: note = Description of Artificial Sequence: Synthetic peptide
SSNIGSKY

SEQ ID NO: 1136 - protein, 8 aa, synthetic construct
  REGION 1..8: note = Description of Artificial Sequence: Synthetic peptide
SSNIGSKY

SEQ ID NO: 1137 - protein, 8 aa, synthetic construct
  REGION 1..8: note = Description of Artificial Sequence: Synthetic peptide
RSNIGNNF

SEQ ID NO: 1138 - protein, 8 aa, synthetic construct
  REGION 1..8: note = Description of Artificial Sequence: Synthetic peptide
RSNIGNNF

SEQ ID NO: 1139 - protein, 8 aa, synthetic construct
  REGION 1..8: note = Description of Artificial Sequence: Synthetic peptide
RSNIGNNF

SEQ ID NO: 1140 - protein, 8 aa, synthetic construct
  REGION 1..8: note = Description of Artificial Sequence: Synthetic peptide
SSNIGNEY

SEQ ID NO: 1141 - protein, 8 aa, synthetic construct
  REGION 1..8: note = Description of Artificial Sequence: Synthetic peptide
SSNIGNEY

SEQ ID NO: 1142 - protein, 8 aa, synthetic construct
  REGION 1..8: note = Description of Artificial Sequence: Synthetic peptide
RSNIGNNF

SEQ ID NO: 1143 - protein, 8 aa, synthetic construct
  REGION 1..8: note = Description of Artificial Sequence: Synthetic peptide
SSNIGNND

SEQ ID NO: 1144 - protein, 8 aa, synthetic construct
  REGION 1..8: note = Description of Artificial Sequence: Synthetic peptide
SSNIGKNF

SEQ ID NO: 1145 - protein, 8 aa, synthetic construct
  REGION 1..8: note = Description of Artificial Sequence: Synthetic peptide
SSNIGTNF

SEQ ID NO: 1146 - protein, 8 aa, synthetic construct
  REGION 1..8: note = Description of Artificial Sequence: Synthetic peptide
SSNIGNNP

SEQ ID NO: 1147 - protein, 8 aa, synthetic construct
  REGION 1..8: note = Description of Artificial Sequence: Synthetic peptide
SSNIGNND

SEQ ID NO: 1148 - protein, 8 aa, synthetic construct
  REGION 1..8: note = Description of Artificial Sequence: Synthetic peptide
SSNIGNNH

SEQ ID NO: 1149 - protein, 8 aa, synthetic construct
  REGION 1..8: note = Description of Artificial Sequence: Synthetic peptide
SSNIGNHD

SEQ ID NO: 1150 - protein, 8 aa, synthetic construct
  REGION 1..8: note = Description of Artificial Sequence: Synthetic peptide
SSNIGDHY

SEQ ID NO: 1151 - protein, 8 aa, synthetic construct
  REGION 1..8: note = Description of Artificial Sequence: Synthetic peptide
SSNIGNNY

SEQ ID NO: 1152 - protein, 8 aa, synthetic construct
  REGION 1..8: note = Description of Artificial Sequence: Synthetic peptide
SSNIGNHD

SEQ ID NO: 1153 - protein, 8 aa, synthetic construct
  REGION 1..8: note = Description of Artificial Sequence: Synthetic peptide
SSNIGNNP

SEQ ID NO: 1154 - protein, 8 aa, synthetic construct
  REGION 1..8: note = Description of Artificial Sequence: Synthetic peptide
SSNIGSNY

SEQ ID NO: 1155 - protein, 8 aa, synthetic construct
  REGION 1..8: note = Description of Artificial Sequence: Synthetic peptide
SSNIGNNY

SEQ ID NO: 1156 - protein, 8 aa, synthetic construct
  REGION 1..8: note = Description of Artificial Sequence: Synthetic peptide
SSNIGNTY

SEQ ID NO: 1157-1335 - skipped (179 entries)

SEQ ID NO: 1336 - protein, 11 aa, synthetic construct
  REGION 1..11: note = Description of Artificial Sequence: Synthetic peptide
GTWDNYLGAGV

SEQ ID NO: 1337 - protein, 11 aa, synthetic construct
  REGION 1..11: note = Description of Artificial Sequence: Synthetic peptide
GTWDTSLSAGA

SEQ ID NO: 1338 - protein, 11 aa, synthetic construct
  REGION 1..11: note = Description of Artificial Sequence: Synthetic peptide
GTWDTSLSNYV

SEQ ID NO: 1339 - protein, 11 aa, synthetic construct
  REGION 1..11: note = Description of Artificial Sequence: Synthetic peptide
ATWDATLNTGV

SEQ ID NO: 1340 - protein, 11 aa, synthetic construct
  REGION 1..11: note = Description of Artificial Sequence: Synthetic peptide
ATWDTSLNVGV

SEQ ID NO: 1341 - protein, 11 aa, synthetic construct
  REGION 1..11: note = Description of Artificial Sequence: Synthetic peptide
LTWDHSLTAYV

SEQ ID NO: 1342 - protein, 11 aa, synthetic construct
  REGION 1..11: note = Description of Artificial Sequence: Synthetic peptide
GTWDTSLSVGM

SEQ ID NO: 1343 - protein, 11 aa, synthetic construct
  REGION 1..11: note = Description of Artificial Sequence: Synthetic peptide
ATWDRGLSTGV

SEQ ID NO: 1344 - protein, 11 aa, synthetic construct
  REGION 1..11: note = Description of Artificial Sequence: Synthetic peptide
GIWDRSLSAWV

SEQ ID NO: 1345 - protein, 11 aa, synthetic construct
  REGION 1..11: note = Description of Artificial Sequence: Synthetic peptide
GTWDVSLSVGM

SEQ ID NO: 1346 - protein, 11 aa, synthetic construct
  REGION 1..11: note = Description of Artificial Sequence: Synthetic peptide
GTWDTSLSVGE

SEQ ID NO: 1347 - protein, 11 aa, synthetic construct
  REGION 1..11: note = Description of Artificial Sequence: Synthetic peptide
GTWDVTLHTGV

SEQ ID NO: 1348 - DNA, 62 bp, synthetic construct
  misc_feature 1..62: note = Description of Artificial Sequence: Synthetic oligonucleotide
  modified_base 51..52: mod_base = OTHER; note = Thymidine-succinyl hexamide CED phosphoramidite
  source 1..62: mol_type = other DNA
agacaatcaaccatttggggtggacagccttgacctctagacttcggcattttttttttttt

SEQ ID NO: 1349 - DNA, 112 bp, synthetic construct
  misc_feature 1..112: note = Description of Artificial Sequence: Synthetic polynucleotide
  modified_base 101..102: mod_base = OTHER; note = Thymidine-succinyl hexamide CED phosphoramidite
  source 1..112: mol_type = other DNA
cgggatccttatcgtcatcgtcgtacagatcccgacccatttgctgtccaccagtcatgctagccataccatgatgatgatgatgatgagaaccccgcattttttttttttt

SEQ ID NO: 1350 - DNA, 19 bp, synthetic construct
  misc_feature 1..19: note = Description of Artificial Sequence: Synthetic primer
  source 1..19: mol_type = other DNA
atgcggggttctcatcatc

SEQ ID NO: 1351 - DNA, 20 bp, synthetic construct
  misc_feature 1..20: note = Description of Artificial Sequence: Synthetic primer
  source 1..20: mol_type = other DNA
cgggatccttatcgtcatcg

SEQ ID NO: 1352 - protein, 440 aa, unidentified
  REGION 1..440: note = Description of Unknown: GLP1R sequence
RPQGATVSLWETVQKWREYRRQCQRSLTEDPPPATDLFCNRTFDEYACWPDGEPGSFVNVSCPWYLPWASSVPQGHVYRFCTAEGLWLQKDNSSLPWRDLSECEESKRGERSSPEEQLLFLYIIYTVGYALSFSALVIASAILLGFRHLHCTRNYIHLNLFASFILRALSVFIKDAALKWMYSTAAQQHQWDGLLSYQDSLSCRLVFLLMQYCVAANYYWLLVEGVYLYTLLAFSVLSEQWIFRLYVSIGWGVPLLFVVPWGIVKYLYEDEGCWTRNSNMNYWLIIRLPILFAIGVNFLIFVRVICIVVSKLKANLMCKTDIKCRLAKSTLTLIPLLGTHEVIFAFVMDEHARGTLRFIKLFTELSFTSFQGLMVAILYCFVNNEVQLEFRKSWERWRLEHLHIQRDSSMKPLKCPTSSLSSGATAGSSMYTATCQASCS

SEQ ID NO: 1353 - protein, 11 aa, synthetic construct
  REGION 1..11: note = Description of Artificial Sequence: Synthetic peptide
GTWDRSLNVGV

SEQ ID NO: 1354 - protein, 11 aa, synthetic construct
  REGION 1..11: note = Description of Artificial Sequence: Synthetic peptide
GTWDRGPNTGV

SEQ ID NO: 1355 - protein, 11 aa, synthetic construct
  REGION 1..11: note = Description of Artificial Sequence: Synthetic peptide
ATWDHSLRVGV

SEQ ID NO: 1356 - protein, 11 aa, synthetic construct
  REGION 1..11: note = Description of Artificial Sequence: Synthetic peptide
GTWDTALTAGV

SEQ ID NO: 1357 - protein, 11 aa, synthetic construct
  REGION 1..11: note = Description of Artificial Sequence: Synthetic peptide
ATWDRGLSTGV

SEQ ID NO: 1358 - protein, 11 aa, synthetic construct
  REGION 1..11: note = Description of Artificial Sequence: Synthetic peptide
ATWDTSLNVGV

SEQ ID NO: 1359 - protein, 11 aa, synthetic construct
  REGION 1..11: note = Description of Artificial Sequence: Synthetic peptide
GTWDRSLSSAV

SEQ ID NO: 1360 - protein, 11 aa, synthetic construct
  REGION 1..11: note = Description of Artificial Sequence: Synthetic peptide
GTWDTSVSAGV

SEQ ID NO: 1361 - protein, 11 aa, synthetic construct
  REGION 1..11: note = Description of Artificial Sequence: Synthetic peptide
ATWDRTLSIGV

SEQ ID NO: 1362 - protein, 11 aa, synthetic construct
  REGION 1..11: note = Description of Artificial Sequence: Synthetic peptide
GTWDTTLNIGV

SEQ ID NO: 1363 - protein, 11 aa, synthetic construct
  REGION 1..11: note = Description of Artificial Sequence: Synthetic peptide
ATWDRSLRAGV

SEQ ID NO: 1364 - protein, 11 aa, synthetic construct
  REGION 1..11: note = Description of Artificial Sequence: Synthetic peptide
GTWDTSLSTGV

SEQ ID NO: 1365 - protein, 11 aa, synthetic construct
  REGION 1..11: note = Description of Artificial Sequence: Synthetic peptide
GTWETSLSAGV

SEQ ID NO: 1366 - protein, 11 aa, synthetic construct
  REGION 1..11: note = Description of Artificial Sequence: Synthetic peptide
GTWVTSLSAGV

SEQ ID NO: 1367 - protein, 11 aa, synthetic construct
  REGION 1..11: note = Description of Artificial Sequence: Synthetic peptide
GTWDRSLSGEV

SEQ ID NO: 1368 - protein, 11 aa, synthetic construct
  REGION 1..11: note = Description of Artificial Sequence: Synthetic peptide
ATWDRGLSTGV

SEQ ID NO: 1369 - protein, 11 aa, synthetic construct
  REGION 1..11: note = Description of Artificial Sequence: Synthetic peptide
ATWDRSLSAVV

SEQ ID NO: 1370 - protein, 11 aa, synthetic construct
  REGION 1..11: note = Description of Artificial Sequence: Synthetic peptide
GTWDKSLSAVV

SEQ ID NO: 1371 - protein, 11 aa, synthetic construct
  REGION 1..11: note = Description of Artificial Sequence: Synthetic peptide
GTWDTSLSGGV

SEQ ID NO: 1372 - protein, 11 aa, synthetic construct
  REGION 1..11: note = Description of Artificial Sequence: Synthetic peptide
GTWDVTLHTGV

SEQ ID NO: 1373 - protein, 11 aa, synthetic construct
  REGION 1..11: note = Description of Artificial Sequence: Synthetic peptide
GTWDASLSAGL

SEQ ID NO: 1374 - protein, 11 aa, synthetic construct
  REGION 1..11: note = Description of Artificial Sequence: Synthetic peptide
GTWESSLSAGV

SEQ ID NO: 1375 - protein, 11 aa, synthetic construct
  REGION 1..11: note = Description of Artificial Sequence: Synthetic peptide
ATWDASLSGGV

SEQ ID NO: 1376 - protein, 11 aa, synthetic construct
  REGION 1..11: note = Description of Artificial Sequence: Synthetic peptide
ATWDATLNTGV

SEQ ID NO: 1377 - protein, 11 aa, synthetic construct
  REGION 1..11: note = Description of Artificial Sequence: Synthetic peptide
GTWDVSLNTQV

SEQ ID NO: 1378 - protein, 11 aa, synthetic construct
  REGION 1..11: note = Description of Artificial Sequence: Synthetic peptide
ATWDATLNTGV

SEQ ID NO: 1379 - protein, 11 aa, synthetic construct
  REGION 1..11: note = Description of Artificial Sequence: Synthetic peptide
GTWDASLSGVV

SEQ ID NO: 1380 - protein, 11 aa, synthetic construct
  REGION 1..11: note = Description of Artificial Sequence: Synthetic peptide
GTWDVTLHTGV

SEQ ID NO: 1381 - protein, 11 aa, synthetic construct
  REGION 1..11: note = Description of Artificial Sequence: Synthetic peptide
GTWDTGLSAGV

SEQ ID NO: 1382 - protein, 11 aa, synthetic construct
  REGION 1..11: note = Description of Artificial Sequence: Synthetic peptide
ATWDATLNTGV

SEQ ID NO: 1383 - protein, 11 aa, synthetic construct
  REGION 1..11: note = Description of Artificial Sequence: Synthetic peptide
GTWDTSLSRYV

SEQ ID NO: 1384 - protein, 11 aa, synthetic construct
  REGION 1..11: note = Description of Artificial Sequence: Synthetic peptide
GTWDTSLSVGV

SEQ ID NO: 1385 - protein, 11 aa, synthetic construct
  REGION 1..11: note = Description of Artificial Sequence: Synthetic peptide
GAWDRSLSAYV

SEQ ID NO: 1386 - protein, 11 aa, synthetic construct
  REGION 1..11: note = Description of Artificial Sequence: Synthetic peptide
ATWDRGLSTGV

SEQ ID NO: 1387 - protein, 11 aa, synthetic construct
  REGION 1..11: note = Description of Artificial Sequence: Synthetic peptide
GTWDTRLSVGV

SEQ ID NO: 1388 - protein, 11 aa, synthetic construct
  REGION 1..11: note = Description of Artificial Sequence: Synthetic peptide
ATWDRSLRAGV

SEQ ID NO: 1389 - protein, 11 aa, synthetic construct
  REGION 1..11: note = Description of Artificial Sequence: Synthetic peptide
ATWDTSLNVGV

SEQ ID NO: 1390 - protein, 11 aa, synthetic construct
  REGION 1..11: note = Description of Artificial Sequence: Synthetic peptide
GTWDTSLATGL

SEQ ID NO: 1391 - protein, 11 aa, synthetic construct
  REGION 1..11: note = Description of Artificial Sequence: Synthetic peptide
GTWDTSLSAGA

SEQ ID NO: 1392 - protein, 11 aa, synthetic construct
  REGION 1..11: note = Description of Artificial Sequence: Synthetic peptide
ATWDRTLSIGV

SEQ ID NO: 1393 - protein, 11 aa, synthetic construct
  REGION 1..11: note = Description of Artificial Sequence: Synthetic peptide
GAWDRSLSAGV

SEQ ID NO: 1394 - protein, 11 aa, synthetic construct
  REGION 1..11: note = Description of Artificial Sequence: Synthetic peptide
ATWDATLNTGV

SEQ ID NO: 1395 - protein, 11 aa, synthetic construct
  REGION 1..11: note = Description of Artificial Sequence: Synthetic peptide
GTWDRSLSAAL

SEQ ID NO: 1396 - protein, 11 aa, synthetic construct
  REGION 1..11: note = Description of Artificial Sequence: Synthetic peptide
ATWDATLNTGV

SEQ ID NO: 1397 - protein, 11 aa, synthetic construct
  REGION 1..11: note = Description of Artificial Sequence: Synthetic peptide
GTWDKSLSAGV

SEQ ID NO: 1398 - protein, 11 aa, synthetic construct
  REGION 1..11: note = Description of Artificial Sequence: Synthetic peptide
ATWDRGLSTGV

SEQ ID NO: 1399 - protein, 11 aa, synthetic construct
  REGION 1..11: note = Description of Artificial Sequence: Synthetic peptide
ATWDTSLSAEV

SEQ ID NO: 1400 - protein, 11 aa, synthetic construct
  REGION 1..11: note = Description of Artificial Sequence: Synthetic peptide
ATWDRTLSIGV

SEQ ID NO: 1401 - protein, 11 aa, synthetic construct
  REGION 1..11: note = Description of Artificial Sequence: Synthetic peptide
GTWGSSLSAGL

SEQ ID NO: 1402 - protein, 11 aa, synthetic construct
  REGION 1..11: note = Description of Artificial Sequence: Synthetic peptide
GAWDRSLSAGV

SEQ ID NO: 1403 - protein, 11 aa, synthetic construct
  REGION 1..11: note = Description of Artificial Sequence: Synthetic peptide
AAWDDYLSAVV

SEQ ID NO: 1404 - protein, 11 aa, synthetic construct
  REGION 1..11: note = Description of Artificial Sequence: Synthetic peptide
GTWDRSLNVGV

SEQ ID NO: 1405 - protein, 11 aa, synthetic construct
  REGION 1..11: note = Description of Artificial Sequence: Synthetic peptide
ATWDRSLRAGV

SEQ ID NO: 1406 - protein, 11 aa, synthetic construct
  REGION 1..11: note = Description of Artificial Sequence: Synthetic peptide
GTWDASLSVWV

SEQ ID NO: 1407 - protein, 11 aa, synthetic construct
  REGION 1..11: note = Description of Artificial Sequence: Synthetic peptide
GTWDNYLGAGV

SEQ ID NO: 1408 - protein, 11 aa, synthetic construct
  REGION 1..11: note = Description of Artificial Sequence: Synthetic peptide
GTWDTSLSAYI

SEQ ID NO: 1409 - protein, 11 aa, synthetic construct
  REGION 1..11: note = Description of Artificial Sequence: Synthetic peptide
GTWDTSLSVGM

SEQ ID NO: 1410 - protein, 11 aa, synthetic construct
  REGION 1..11: note = Description of Artificial Sequence: Synthetic peptide
ATWDRGLSTGV

SEQ ID NO: 1411 - protein, 11 aa, synthetic construct
  REGION 1..11: note = Description of Artificial Sequence: Synthetic peptide
GTWDANLRAGV

SEQ ID NO: 1412 - protein, 11 aa, synthetic construct
  REGION 1..11: note = Description of Artificial Sequence: Synthetic peptide
ATWDTSLSEGV

SEQ ID NO: 1413 - protein, 11 aa, synthetic construct
  REGION 1..11: note = Description of Artificial Sequence: Synthetic peptide
ATWDRGLSTGV

SEQ ID NO: 1414 - protein, 11 aa, synthetic construct
  REGION 1..11: note = Description of Artificial Sequence: Synthetic peptide
GTWDISLSAAV

SEQ ID NO: 1415 - protein, 11 aa, synthetic construct
  REGION 1..11: note = Description of Artificial Sequence: Synthetic peptide
ATWDTRLSAVV

SEQ ID NO: 1416 - protein, 11 aa, synthetic construct
  REGION 1..11: note = Description of Artificial Sequence: Synthetic peptide
GTWDASLGAWV

SEQ ID NO: 1417 - protein, 11 aa, synthetic construct
  REGION 1..11: note = Description of Artificial Sequence: Synthetic peptide
GTWDARLGGAV

SEQ ID NO: 1418 - protein, 11 aa, synthetic construct
  REGION 1..11: note = Description of Artificial Sequence: Synthetic peptide
GTWDARLGGAV

SEQ ID NO: 1419 - protein, 11 aa, synthetic construct
  REGION 1..11: note = Description of Artificial Sequence: Synthetic peptide
GTWDNRLSGWV

SEQ ID NO: 1420 - protein, 11 aa, synthetic construct
  REGION 1..11: note = Description of Artificial Sequence: Synthetic peptide
ATWDATLNTGV

SEQ ID NO: 1421 - protein, 11 aa, synthetic construct
  REGION 1..11: note = Description of Artificial Sequence: Synthetic peptide
GTWDVSLNTQV

SEQ ID NO: 1422 - protein, 11 aa, synthetic construct
  REGION 1..11: note = Description of Artificial Sequence: Synthetic peptide
GTWDTSLNIGV

SEQ ID NO: 1423 - protein, 11 aa, synthetic construct
  REGION 1..11: note = Description of Artificial Sequence: Synthetic peptide
GTWDTSLSGGI

SEQ ID NO: 1424 - protein, 11 aa, synthetic construct
  REGION 1..11: note = Description of Artificial Sequence: Synthetic peptide
GTWESSLSAGV

SEQ ID NO: 1425 - protein, 11 aa, synthetic construct
  REGION 1..11: note = Description of Artificial Sequence: Synthetic peptide
GTWDTSLSVGM

SEQ ID NO: 1426 - protein, 11 aa, synthetic construct
  REGION 1..11: note = Description of Artificial Sequence: Synthetic peptide
GTWDTSLSVGE

SEQ ID NO: 1427 - protein, 11 aa, synthetic construct
  REGION 1..11: note = Description of Artificial Sequence: Synthetic peptide
VTWDRSLSAGV

SEQ ID NO: 1428 - protein, 11 aa, synthetic construct
  REGION 1..11: note = Description of Artificial Sequence: Synthetic peptide
GTWDTSLSVGM

SEQ ID NO: 1429 - protein, 11 aa, synthetic construct
  REGION 1..11: note = Description of Artificial Sequence: Synthetic peptide
GTWDAGLSTGV

SEQ ID NO: 1430 - protein, 11 aa, synthetic construct
  REGION 1..11: note = Description of Artificial Sequence: Synthetic peptide
GTWDTSLSAGV

SEQ ID NO: 1431 - protein, 11 aa, synthetic construct
  REGION 1..11: note = Description of Artificial Sequence: Synthetic peptide
ATWDNRLSAGV

SEQ ID NO: 1432 - protein, 11 aa, synthetic construct
  REGION 1..11: note = Description of Artificial Sequence: Synthetic peptide
GTWDRGPNTGV

SEQ ID NO: 1433 - protein, 11 aa, synthetic construct
  REGION 1..11: note = Description of Artificial Sequence: Synthetic peptide
GTWDTSLSVGE

SEQ ID NO: 1434 - protein, 11 aa, synthetic construct
  REGION 1..11: note = Description of Artificial Sequence: Synthetic peptide
GTWDISPSAWV

SEQ ID NO: 1435 - protein, 11 aa, synthetic construct
  REGION 1..11: note = Description of Artificial Sequence: Synthetic peptide
GTWDESLRSWV

SEQ ID NO: 1436 - protein, 11 aa, synthetic construct
  REGION 1..11: note = Description of Artificial Sequence: Synthetic peptide
GTWDTSLSVGE

SEQ ID NO: 1437 - protein, 11 aa, synthetic construct
  REGION 1..11: note = Description of Artificial Sequence: Synthetic peptide
ATWDNKLTSGV

SEQ ID NO: 1438 - protein, 11 aa, synthetic construct
  REGION 1..11: note = Description of Artificial Sequence: Synthetic peptide
ATWDTSLNVGV

SEQ ID NO: 1439 - protein, 11 aa, synthetic construct
  REGION 1..11: note = Description of Artificial Sequence: Synthetic peptide
GTWDTSLSAYI

SEQ ID NO: 1440 - protein, 11 aa, synthetic construct
  REGION 1..11: note = Description of Artificial Sequence: Synthetic peptide
GTWDRGPNTGV

SEQ ID NO: 1441 - protein, 11 aa, synthetic construct
  REGION 1..11: note = Description of Artificial Sequence: Synthetic peptide
GTWDTSLSAGA

SEQ ID NO: 1442 - protein, 11 aa, synthetic construct
  REGION 1..11: note = Description of Artificial Sequence: Synthetic peptide
GTWDTSLSVGE

SEQ ID NO: 1443 - protein, 11 aa, synthetic construct
  REGION 1..11: note = Description of Artificial Sequence: Synthetic peptide
ATWDATLNTGV

SEQ ID NO: 1444 - protein, 11 aa, synthetic construct
  REGION 1..11: note = Description of Artificial Sequence: Synthetic peptide
GTWDRSLNVGV

SEQ ID NO: 1445 - protein, 11 aa, synthetic construct
  REGION 1..11: note = Description of Artificial Sequence: Synthetic peptide
GTWDNNLGAGV

SEQ ID NO: 1446 - protein, 11 aa, synthetic construct
  REGION 1..11: note = Description of Artificial Sequence: Synthetic peptide
GTWDTSLSTGV

SEQ ID NO: 1447 - protein, 11 aa, synthetic construct
  REGION 1..11: note = Description of Artificial Sequence: Synthetic peptide
GTWDRGPNTGV

SEQ ID NO: 1448 - protein, 11 aa, synthetic construct
  REGION 1..11: note = Description of Artificial Sequence: Synthetic peptide
GTWDTSLATGL

SEQ ID NO: 1449 - protein, 11 aa, synthetic construct
  REGION 1..11: note = Description of Artificial Sequence: Synthetic peptide
GTWDTTLSAGV

SEQ ID NO: 1450 - protein, 11 aa, synthetic construct
  REGION 1..11: note = Description of Artificial Sequence: Synthetic peptide
GTWDASLSAGL

SEQ ID NO: 1451 - protein, 11 aa, synthetic construct
  REGION 1..11: note = Description of Artificial Sequence: Synthetic peptide
GTWDASLSAGL

SEQ ID NO: 1452 - protein, 11 aa, synthetic construct
  REGION 1..11: note = Description of Artificial Sequence: Synthetic peptide
GTWDRTLSIGV

SEQ ID NO: 1453 - protein, 11 aa, synthetic construct
  REGION 1..11: note = Description of Artificial Sequence: Synthetic peptide
GTWDRRLSDVV

SEQ ID NO: 1454 - protein, 11 aa, synthetic construct
  REGION 1..11: note = Description of Artificial Sequence: Synthetic peptide
GTWDRSLSSAV

SEQ ID NO: 1455 - protein, 11 aa, synthetic construct
  REGION 1..11: note = Description of Artificial Sequence: Synthetic peptide
GTWDRSLNVGV

SEQ ID NO: 1456 - protein, 11 aa, synthetic construct
  REGION 1..11: note = Description of Artificial Sequence: Synthetic peptide
GTWDISLSARV

SEQ ID NO: 1457 - protein, 11 aa, synthetic construct
  REGION 1..11: note = Description of Artificial Sequence: Synthetic peptide
ATWDTSLSAGV

SEQ ID NO: 1458 - protein, 11 aa, synthetic construct
  REGION 1..11: note = Description of Artificial Sequence: Synthetic peptide
GTWDTSLATGL

SEQ ID NO: 1459 - protein, 11 aa, synthetic construct
  REGION 1..11: note = Description of Artificial Sequence: Synthetic peptide
GTWDTSVSAGV

SEQ ID NO: 1460 - protein, 11 aa, synthetic construct
  REGION 1..11: note = Description of Artificial Sequence: Synthetic peptide
GTWDRSLNVGV

SEQ ID NO: 1461 - protein, 11 aa, synthetic construct
  REGION 1..11: note = Description of Artificial Sequence: Synthetic peptide
GTWHSSLSAGV

SEQ ID NO: 1462 - protein, 11 aa, synthetic construct
  REGION 1..11: note = Description of Artificial Sequence: Synthetic peptide
GTWDTTLSAGV

SEQ ID NO: 1463 - protein, 11 aa, synthetic construct
  REGION 1..11: note = Description of Artificial Sequence: Synthetic peptide
GAWDTSLSAVV

SEQ ID NO: 1464 - protein, 11 aa, synthetic construct
  REGION 1..11: note = Description of Artificial Sequence: Synthetic peptide
GTWDTSLSVGE

SEQ ID NO: 1465 - protein, 11 aa, synthetic construct
  REGION 1..11: note = Description of Artificial Sequence: Synthetic peptide
GTWDTSLATGL

SEQ ID NO: 1466 - protein, 11 aa, synthetic construct
  REGION 1..11: note = Description of Artificial Sequence: Synthetic peptide
ATWDRGLSTGV

SEQ ID NO: 1467 - protein, 11 aa, synthetic construct
  REGION 1..11: note = Description of Artificial Sequence: Synthetic peptide
GTWDRSLSVGL

SEQ ID NO: 1468 - protein, 11 aa, synthetic construct
  REGION 1..11: note = Description of Artificial Sequence: Synthetic peptide
GTWDAGLSTGV

SEQ ID NO: 1469 - protein, 11 aa, synthetic construct
  REGION 1..11: note = Description of Artificial Sequence: Synthetic peptide
GTWDTSLSVGE

SEQ ID NO: 1470 - protein, 11 aa, synthetic construct
  REGION 1..11: note = Description of Artificial Sequence: Synthetic peptide
ATWDRTLSIGV

SEQ ID NO: 1471 - protein, 11 aa, synthetic construct
  REGION 1..11: note = Description of Artificial Sequence: Synthetic peptide
GIWDRSLSAWV

SEQ ID NO: 1472 - protein, 11 aa, synthetic construct
  REGION 1..11: note = Description of Artificial Sequence: Synthetic peptide
GTWDTSLATGL

SEQ ID NO: 1473 - protein, 11 aa, synthetic construct
  REGION 1..11: note = Description of Artificial Sequence: Synthetic peptide
GTWDRGPNTGV

SEQ ID NO: 1474 - protein, 11 aa, synthetic construct
  REGION 1..11: note = Description of Artificial Sequence: Synthetic peptide
GTWDVSLSVGM

SEQ ID NO: 1475 - protein, 11 aa, synthetic construct
  REGION 1..11: note = Description of Artificial Sequence: Synthetic peptide
GTWDVSLSVGM

SEQ ID NO: 1476 - protein, 11 aa, synthetic construct
  REGION 1..11: note = Description of Artificial Sequence: Synthetic peptide
ATWDTSLSEGV

SEQ ID NO: 1477 - protein, 11 aa, synthetic construct
  REGION 1..11: note = Description of Artificial Sequence: Synthetic peptide
GTWDVTLHAGV

SEQ ID NO: 1478 - protein, 11 aa, synthetic construct
  REGION 1..11: note = Description of Artificial Sequence: Synthetic peptide
ATWDRSLSAGV

SEQ ID NO: 1479 - protein, 11 aa, synthetic construct
  REGION 1..11: note = Description of Artificial Sequence: Synthetic peptide
GTWDNNLGAGV

SEQ ID NO: 1480 - protein, 11 aa, synthetic construct
  REGION 1..11: note = Description of Artificial Sequence: Synthetic peptide
GTWDASLSAGL

SEQ ID NO: 1481 - protein, 11 aa, synthetic construct
  REGION 1..11: note = Description of Artificial Sequence: Synthetic peptide
GTWDTSLSVGE

SEQ ID NO: 1482 - protein, 11 aa, synthetic construct
  REGION 1..11: note = Description of Artificial Sequence: Synthetic peptide
ATWDDTLTAGV

SEQ ID NO: 1483 - protein, 11 aa, synthetic construct
  REGION 1..11: note = Description of Artificial Sequence: Synthetic peptide
GIWDTSLSAWV

SEQ ID NO: 1484 - protein, 11 aa, synthetic construct
  REGION 1..11: note = Description of Artificial Sequence: Synthetic peptide
GTWDNRLSAGV

SEQ ID NO: 1485 - protein, 11 aa, synthetic construct
  REGION 1..11: note = Description of Artificial Sequence: Synthetic peptide
GTWDTSLRVVV

SEQ ID NO: 1486 - protein, 11 aa, synthetic construct
  REGION 1..11: note = Description of Artificial Sequence: Synthetic peptide
GTWESGLSAGV

SEQ ID NO: 1487 - protein, 11 aa, synthetic construct
  REGION 1..11: note = Description of Artificial Sequence: Synthetic peptide
ATWDHSLRVGV

SEQ ID NO: 1488 - protein, 11 aa, synthetic construct
  REGION 1..11: note = Description of Artificial Sequence: Synthetic peptide
GTWHSSLSAGV

SEQ ID NO: 1489 - protein, 11 aa, synthetic construct
  REGION 1..11: note = Description of Artificial Sequence: Synthetic peptide
GTWDTRLSVGV

SEQ ID NO: 1490 - protein, 11 aa, synthetic construct
  REGION 1..11: note = Description of Artificial Sequence: Synthetic peptide
GTWDTSLTAGV

SEQ ID NO: 1491 - protein, 11 aa, synthetic construct
  REGION 1..11: note = Description of Artificial Sequence: Synthetic peptide
ATWDATLNTGV

SEQ ID NO: 1492 - protein, 11 aa, synthetic construct
  REGION 1..11: note = Description of Artificial Sequence: Synthetic peptide
GTWDTSLSVGM

SEQ ID NO: 1493 - protein, 11 aa, synthetic construct
  REGION 1..11: note = Description of Artificial Sequence: Synthetic peptide
GTWDRGPNTGV

SEQ ID NO: 1494 - protein, 11 aa, synthetic construct
  REGION 1..11: note = Description of Artificial Sequence: Synthetic peptide
GTWDNRLSGWV

SEQ ID NO: 1495 - protein, 11 aa, synthetic construct
  REGION 1..11: note = Description of Artificial Sequence: Synthetic peptide
ATWDRGLSTGV

SEQ ID NO: 1496 - protein, 11 aa, synthetic construct
  REGION 1..11: note = Description of Artificial Sequence: Synthetic peptide
ATWDRSLSAGV

SEQ ID NO: 1497 - protein, 11 aa, synthetic construct
  REGION 1..11: note = Description of Artificial Sequence: Synthetic peptide
GTWDRRLSAVV

SEQ ID NO: 1498 - protein, 11 aa, synthetic construct
  REGION 1..11: note = Description of Artificial Sequence: Synthetic peptide
GTWDNYLGAVV

SEQ ID NO: 1499 - protein, 11 aa, synthetic construct
  REGION 1..11: note = Description of Artificial Sequence: Synthetic peptide
ATWDATLNTGV

SEQ ID NO: 1500 - protein, 11 aa, synthetic construct
  REGION 1..11: note = Description of Artificial Sequence: Synthetic peptide
GSWDRSLSAVV

SEQ ID NO: 1501 - protein, 11 aa, synthetic construct
  REGION 1..11: note = Description of Artificial Sequence: Synthetic peptide
ATWDNILSAWV

SEQ ID NO: 1502 - protein, 11 aa, synthetic construct
  REGION 1..11: note = Description of Artificial Sequence: Synthetic peptide
ATWDRGLSTGV

SEQ ID NO: 1503 - protein, 11 aa, synthetic construct
  REGION 1..11: note = Description of Artificial Sequence: Synthetic peptide
GTWDRTLSIGV

SEQ ID NO: 1504 - protein, 11 aa, synthetic construct
  REGION 1..11: note = Description of Artificial Sequence: Synthetic peptide
GTWDASLGAVV

SEQ ID NO: 1505 - protein, 11 aa, synthetic construct
  REGION 1..11: note = Description of Artificial Sequence: Synthetic peptide
GTWDAGLSTGV

SEQ ID NO: 1506 - protein, 11 aa, synthetic construct
  REGION 1..11: note = Description of Artificial Sequence: Synthetic peptide
ATWDRSLRAGV

SEQ ID NO: 1507 - protein, 11 aa, synthetic construct
  REGION 1..11: note = Description of Artificial Sequence: Synthetic peptide
GTWESGLSAGV

SEQ ID NO: 1508 - protein, 11 aa, synthetic construct
  REGION 1..11: note = Description of Artificial Sequence: Synthetic peptide
ATWDNKLTSGV

SEQ ID NO: 1509 - protein, 11 aa, synthetic construct
  REGION 1..11: note = Description of Artificial Sequence: Synthetic peptide
ATWDRSLRAGV

SEQ ID NO: 1510 - protein, 11 aa, synthetic construct
  REGION 1..11: note = Description of Artificial Sequence: Synthetic peptide
GTWDTSLSAGV

SEQ ID NO: 1511 - protein, 11 aa, synthetic construct
  REGION 1..11: note = Description of Artificial Sequence: Synthetic peptide
ATWDTTLNTGV

SEQ ID NO: 1512 - protein, 11 aa, synthetic construct
  REGION 1..11: note = Description of Artificial Sequence: Synthetic peptide
ASWDNRLTAVV

SEQ ID NO: 1513 - protein, 11 aa, synthetic construct
  REGION 1..11: note = Description of Artificial Sequence: Synthetic peptide
ATWDRGLSTGV

SEQ ID NO: 1514 - protein, 11 aa, synthetic construct
  REGION 1..11: note = Description of Artificial Sequence: Synthetic peptide
ATWDTSLSEGV

SEQ ID NO: 1515 - protein, 11 aa, synthetic construct
  REGION 1..11: note = Description of Artificial Sequence: Synthetic peptide
GTWDTSLSGGV

SEQ ID NO: 1516 - protein, 11 aa, synthetic construct
  REGION 1..11: note = Description of Artificial Sequence: Synthetic peptide
ATWDRGLSTGV

SEQ ID NO: 1517 - protein, 11 aa, synthetic construct
  REGION 1..11: note = Description of Artificial Sequence: Synthetic peptide
GTWDTSLSVGM

SEQ ID NO: 1518 - protein, 11 aa, synthetic construct
  REGION 1..11: note = Description of Artificial Sequence: Synthetic peptide
GTWDRGPNTGV

SEQ ID NO: 1519 - protein, 11 aa, synthetic construct
  REGION 1..11: note = Description of Artificial Sequence: Synthetic peptide
GTWDRSLGGWV

SEQ ID NO: 1520 - protein, 15 aa, synthetic construct
  REGION 1..15: note = Description of Artificial Sequence: Synthetic peptide
GGGGSGGGGSGGGGS

SEQ ID NO: 1521 - DNA, 30 bp, synthetic construct
  misc_feature 1..30: note = Description of Artificial Sequence: Synthetic primer
  source 1..30: mol_type = other DNA
acagaattcattaaagaggagaaattaacc

SEQ ID NO: 1522 - DNA, 20 bp, synthetic construct
  misc_feature 1..20: note = Description of Artificial Sequence: Synthetic primer
  source 1..20: mol_type = other DNA
tgaaccgcctccaccgctag

SEQ ID NO: 1523 - protein, 37 aa, synthetic construct
  REGION 1..37: note = Description of Artificial Sequence: Synthetic polypeptide
  VARIANT 15..19: note = Any amino acid
CARDLRELECEEWTXXXXXSRGPCVDPRGVAGSFDVW

SEQ ID NO: 1524 - protein, 26 aa, synthetic construct
  REGION 1..26: note = Description of Artificial Sequence: Synthetic peptide
  VARIANT 10..14: note = Any amino acid
CARDMYYDFXXXXXEVVPADDAFDIW

SEQ ID NO: 1525 - protein, 35 aa, synthetic construct
  REGION 1..35: note = Description of Artificial Sequence: Synthetic polypeptide
  VARIANT 17..21: note = Any amino acid
CARDGRGSLPRPKGGPXXXXXYDSSEDSGGAFDIW

SEQ ID NO: 1526 - protein, 23 aa, synthetic construct
  REGION 1..23: note = Description of Artificial Sequence: Synthetic peptide
  VARIANT 9..13: note = Any amino acid
CARANQHFXXXXXGYHYYGMDVW

SEQ ID NO: 1527 - protein, 25 aa, synthetic construct
  REGION 1..25: note = Description of Artificial Sequence: Synthetic peptide
  VARIANT 9..13: note = Any amino acid
CAKHMSMQXXXXXRADLVGDAFDVW

SEQ ID NO: 1528 - protein, 31 aa, synthetic construct
  REGION 1..31: note = Description of Artificial Sequence: Synthetic polypeptide
HAEGTFTSDVSSYLEGQAAKEFIAWLVKGRG

SEQ ID NO: 1529 - protein, 33 aa, synthetic construct
  REGION 1..33: note = Description of Artificial Sequence: Synthetic polypeptide
HADGSFSDEMNTILDNLAARDFINWLIQTKITD

SEQ ID NO: 1530 - protein, 68 aa, synthetic construct
  REGION 1..68: note = Description of Artificial Sequence: Synthetic polypeptide
CARDMYYDFGYFTGMNTILDNLAARDFINWLIQTKITDRGGGSGGSGGSGGSGGSGEVVPADDAFDIW
